United States Patent Application Publication US 2008/0286273 A1 - sequence listing, part 2

SEQ ID NO: 89 - DNA, 76940 bp, Homo sapiens
caaataaaagcgatggcgattgggctgccgcgtttggcgctcggtccggtcgcgtccgacacccggtgggactcagaaggcagtggagccccggcggcggcggcggcggcgcgcgggggcgacgcgcgggaacaacgcgagtcggcgcgcgggacgaaggtaacgcgccgctgcgggcggcccggccggcggggctccgggagtgcgaaccgggcggcggcggcggcgccaggacctccccgccactgctgtgccggtcccgggtatcgccgagcggggctcaccggggcgccgcgtttgtaggcgtgcggggggtggagggtgaggggagagcccccctccccggaaggagctgtgagcttcgggctggcccgcgggaccctgcgagtgaggcagcgcacacccctggagctgcggggcggggggcgtgtggggggctcctttcccggtgcttgtcctggccggggcgccggggccggggtcggggcgttccggtgcccggtccagggtggcagctcgagcctcaagtctcctttgtgtggcgcggccgcggcgggagcgcccgggtgggacgggacagacacaagttggtgggacccagccgccgagtccgcactcagacaaaggacggactgtgtctccggagggctcggcgcgaggggaaggggcatgacacccgggcccgccggcgggcgggagaggggcgtggggaggcgcgggccgctgccggggtgggcagggctcggccctcgcctcgcgcacgcccccggtcccgggcgcgccgaccccgggctggggccgcggcgctcgcgggacgacgttcgcggcggggaactcggagtagcttcgcctctgacgtttccccacgacgcaccccgaaatccccctgagctccggcggtcgcgggctgccctcgccgcctggtctggctttatgctaagtttgagggaagagtcgagctgctctgctctctattgattgtgtttctggagggcgtcctgttgaattcccacttcattgtgtacatccccttccgttccccccaaaaatctgtgccacagggttactttttgaaagcgggaggaatcgagaagcacgatcttttggaaaacttggtgaacgcctagtgagttgccactttctaaagaatcgtaatccttaaacattacaagctgttttggccaacttgtgtgatacatctgagaatggcgacaggtgctaacgaaatcaactgtcattcagccagattattccccaaatcccgacgggttgaatgaggatgaggtggtagaagtaggtgatcaaaatagaatggctatgacaaatgtgtgtttagattatacggttagcagtttcttattaattggtctcgttttctgtgaacaatagctttggtgattcagaaaagactgcatggagaaatgtttgttgcctaagaaatttaacgtgtgctgtccacagttaaacttcctttatcacacaggatctgtaacatttaaattcatttggaaataaaaatgtgtctttgctatttacttaaaggcttgctttttagggttcaagcaagttattattagtttaattttgtggcgttttgatgtcatcataaaacagcatttaataaacctttgaaaaacacgaatgctgtcacaattgaatgtagtttatacttttaggggttttggagtttattttctattactcttcataagcattagcaactaattcatgtttaggaatactgtacaagtgtgtaatcctaacttgtttatttgtaattttatttgcaggaaaacaagtatttaagatatattttaattttctattcatggtctctaaagttaggaataggtaggattctagtcatagatataaagcgtcttgttctctcttttcggaggtgtgttgggtgatgtaatatttaaggtttcccggaaacaggaacactgcatcttaaattctcgtttttgtggaaagtgaatatattccaagaaaacaagttagaaaaacataggcgttcttctggttgcactgtcctatatgataaagatctaatgtgcatctgctaacttaaggtttcataaaaatggagacaaataaatgcaatataaatttattacatatattttggagagtgttgacaccactgtacgggcattccaggtgctggtctaagtgttgagacattataacaaaaaagtaacgtttatattagttactattaattctgtatttaaaaaatcctattaataatcttgtccattatgagataaggtagttatgcagatttttggcagaaattcggatattttaggatacatatgtgtgtgtgtgtgtgtgtgtgtgtgtgcgcgcgcgtgtgtgtgtgtgtatatgtttttttttttttgagacagagccttgctctgtcgtccaggctggagtgcagtggctggatctgggctcactacaatctctgcctcccgggtttaaggaattcccctgcctcagcctcccgagtagctggaactacaggcacgcaccacgacacccggctaatttttgtatttttagcagagacagggtttcaccatgttggccaggctggtctcgaactcctgacctgaagtgatgtacccgcctccgcctcccaaaatgctgatccagacgtgagccaccacgcccagcctaggataaaaatttctaactttgcccttgagtgttctctgtatttgataattactattctttgtacttgccatgagatattttgaaaaacatctctttggggaattggtttaaaaattcatattaaattattttctggtacaattgagaatgtatttagtcagtttaagtagcagtgacttaaaacacacttgttgatctagtgtagttagaaaaagttctgatactttgatacctagctttgccttgcacaaatacatttaagtgaatatctttatgttggccatttaaaaattttaggcaaatttctccaagtcatactggaattttcccaggataccttccttcttttgaggtagtgtgctcaaggattctgaatttatttcagtattaccctttacatgagcagtgattgagaaagttgatctgctttttaaaaaccaacaaggacaaatcctccaatataatgtattctgtggttaattagcaatgatttatggattagccttgaagtctttatatcagtatagatgacaaattttctgtaaatcatgatagattctatatgagtaggtgaaatcttcgggggagagcataagtgaacagcagcaattcattaaattcagagaaaggttcatggtcagatgatacatactttaccttctggaggtcttccctgaattcccactcttgtgttcccacagggttttatcatattttattgtagcatgactcaattgtattgtaatcacttgtttatgcatccctctcttccctacagtcaaagtgcctcctggtagaggctctgtcttatttttttctttgtatacctagtacctacgttggtatttgctagagaataggggttttaaatatagttgaatgaattaaggaaatatgaaaaatgtagggaaataatttgacaaaggaacttgcaaagtgaacaggatatgttagtattcatgtgaggaactttgaaatgtgtttttctccctctttaatagggaatgattacaaagaaaaatagttgtcaaggtgaacaagttccaagtttttcctagttataatctgtagtactaaacattagatatcctttagatgcaactattacactcggacaactggagagaacttgatgaatcatctggatatttagtaatagtatttgcttaatttgatttaatgttgatattgatgatctctttgcaaaaatataaggaagggaaagggcgagagagggtagtagatcttttaactgaaaagctgttttgttataattcatgagttctttattggagtaaattgaggtaggttttggagctaaaactgaaggatgtagcgacagtgtaattggatcatttattgggatgcttttcatcattcttttaaaatgatttaaatacagattagcaaatttagtgatacctcaaaagttacagctggtaaatttctaagatagttgcaccattccatatcttgccactgttccactacttggtataaaaatatgacaaatttgtgtttagattatgtggttagcagtttcttaataattggtcttgttttccattaacaatagcaagacagaacaagatcatagctcactgcatccttaaactcctgggctcaagggatcctcctgtctcagcctcctgagtaactggtattaccagtgcacaccattgtggtgacttatttaattttttaattttttgtagagatgggatcctgctttgttgcccacgttgatctcaaactcctggctccaggcaatcctcctgccttggcctcttaaagtacagggatgacaggctgagccattgtgtttgacccagatactttttttttttgagacggagtctcgaaagtgattcttgtgcctcagcctcctgagtagctgggactacaagcgtgcgccaccacgctcggctaatttatttatttattatttattatttatttttttgagatgcagtgtcactctgtcacctagactggagtgcagtggcaccatcttggctcactgcaacctccacctcctgggttcaaatgattctcctgcctcacctctcaagtagttgggattacaggcatgcaccaccaggcctggctaatttttgtatttttagtagtgatgggatttcaccatgttggccaggctggtctcgaactcccgacctcaggtgatccacctgccctggcctcccaaagtactaggattacaggcgtcagtcactgtgcccagcctccgataatttttatattttagtagaaactgggtttcactgtgttggccaggctggtctggaactcctgacctcaagtgattgacctgcctcgtcctcccaaagtggtgggattataggtgtgagccaccacaccctgctgtgttgtttttgtttttgttttttgtttttgtttttgttttttgatatggagtctcacacttgttgcccaggctggagtgcagtggcgtgatctcggctcactgcaacctctgcctcctgggttcaagcgattctcctacctcagcctcccgagtagctgggattacgggaacgcaccaccacacctggctaatttttgtatttttagttgagatggggtttcaccacgttggccaagctagtctcgaactgctgacctcagatgatccgcctgcctcggcctcccaaagtgctgggattacaggcgtgagctactgcgcacgcctggcctggatactttttaaacatttttaaattaaaaatttttttttggagacagggtcttgttgtcacccaggctggagtgcagatgcgtgatctcagttcactgcaacctctgcctcctgggctcaagcgatccttccatctcagcctcccaagtagctgggactacaagtgcatgccaccacgcctggctaatttttgtattttttgtagagacagggttttgccatgttgcccaggctggtcttgaactcctgaactcaagagatccacctacctcagcctcccaaagtgctgggattataggtgtgacccactgcacccagcttttgtttttaatatttgtaagaaccaccttgtgtctgccaacaggcgaattaacaaaatgtggtatataaaccaatgaaaacataaaaggagtgaaataaagacgtaaaaggagtgaaatttcaaaataaaagtaaaaagatttcaaaataattcagacataaaaggagtgaaattctgatacatggatggagctggagaatattatgcttagtgaaataagccagatacaaccttttgtacaaaaatacaaaattgtatgatctcatttatatgaggtagttagaagaggcaactctatggagacagaaagtagaatagaggttaccagggctgtgaggggagaggtgaatggggagtttaatgaatacagagtttctgtttggaatggtgaaaaaattctggagatggataatagtgatggttgaacaatattttgaatatatttaatgccacagaattgtacacttaaaaatggttaaaatggtaaattttacacgatatgtatctgtatctatatatatctctctctatatctatatatcttaccagaatacaaaatttaataacacactccgaaaacctttacagatgaggaaactgaagaaaactgtctacaggggaggagttaagaatttgcccaggattattcagctgggaatttgcattcgggatccaaacttagttctgtttcactacatattatctactccatattatctgttctgtgttatctgctggctttctgggtgattaaagatatgtcagctccgagaagaatgagtttatttgaatcattcagaaagttacatttaaaagtaggtaattgtagtttgatggaaggtacagtgtgaaaccctagacagactaaaggttaactttgaggatttctttctcagccagagtggtaatagtatgcatttgagaggggaggagagtagagttctaaggatgtggtctttggagacagtttcttgggttccagtccctgagctaccaatttgtgtctggggtgttatcctcttgatgtcttagcatccctatctgtaaattggtgaggataatgataacatctgataaggtggttgtgaggattaaaggaattgatacatgtgaaatccttagaactgtacctggcaaaaagtgtttgataaatgattttcagttattgtgccaatattattttagagttgatgtactttctcattaatggaaccaaacacttctcaagttaaaattacgtgcttaggactggtaagttacaaaaatggtaccacacgttttatctatttcaatttagaaatgtctgttgattaaatgtgttcgctttaaactactgaaacaatgtagacatttataaaatgaaagcgtattgatccctgttatctcattcgctacctttaacggtttggtgtatattcttccccaaattttcaaatatattcatatatgaatatgtatttttacatacattttataaaaatgggaccaagttatttggttctaacatggcttttttttaaggtcaatacaaagatctgttttattaaaaaataattgatattcctttagggctcactatatgcttggtactcttctaagtcattattttatatagatactataatatcgagagatggagagattaagtaacaactagttagtggtagaggaaggattttaatttgggtacgttagcttcaaagtcctgatctcccagccagggatcatttttggtaaggcctgtgagctggaaacgttaacacttttaaaagagttgtaaaacaataccaccccacttccctgaagaacatataagggagactagataccgcctgccaagcctaaaatacttaccatgtggccctttacagagaaagtttgctgccccttgctctaagccatccagctgtacctctttggtgtaaggggggtgcatagtattccagtttatgaatgtgcattacgcagcaaaccaatctgttgtgattgacattgttttctctcctgaaaagaagtgaacatccttatgtatctttgaacatttgtgtgacaattttctatagagttggctctttcaagattatgaacatttctagttttaataggtgttgtcaagttatattaatttttagttaaaacaacaactgtattgaagtataatttacatacaataaaaagcacacatttgaagggtatgatttgaggagttttgacaaatgtatgcacctgcaccgctgcctggatcaagatctataatggttgccatcatctcagagtcctttcatcctcttttacagtcattctctcaacttttttttttttccctccaagatggagtcttgctctgtcacccaggctggagtgcaatggcatgatctcggctcactgcaacctccgcctcctgggttcaagcaattctcctgcctcagtctcccgagtagctgggattacaggcgtctgccaccacacccagctaatttttgtagttttaggcgagatctcagctcactgcaaccttgacctcctgggctcaatcgaacctctcacctcagcctcccaagtagctaggaccacaggcatgtaccaccatgcccagctaacatttattattaatatttttttgtagagatggggttttcctgtgtcgcccaggatggtttccaactcctgggctcaaatgattctgccttggcctcccaaagtgttgggattacaggcatgagccgcggcacctgacttgtagtaaactctctgaattaatattccattgtaggcatgtgctacagtttttaaattcatttacccatggatggacacataggactgttgtcagctgttgataaagctgctatcaccatttgtatgtctttcctggacatgttttagtggtaaatattgattttactttgtaagaaaccgttaaactcttttccaaaatagttgtaccattttaaattgaaagttacagttgtaactgtgcaggagttacagtttcttcacattttcattgacacttcgtgttgccagtcttttaaattttggccatcaaatgagtattaagtatctcattgtgggtttgtgtttctcagatgatcaatgatgttggaacatcttttcatatgcttattggccatttgtgtactttttttggttcaagccttttgtccctttaaaaaattggattgtttgtctggttgagtggcaagaggtctttatatgttctgggtacatagtcacattatctgtcagattgtgttgcaaatattttattgttcatttttgtttgattttgtgtatttttaatactataaagatcaagttaaaactttaatatgggaagcataatcagataaattatgtgaaacaaattgtccttaattcacgagtcatttaattagtgtaacaaaatgttatgcatttgcagaaacttgtaaactaaaaggatattattcatatgctgttaggtgtatggatgataattttttttaattaaactagttttgaaaattattgtatttagtaattctcttcattttgcataattcaaaccttttcatttattagtgagttaagccttaaattttttcttcaaaggataaatgagaatattaaaagtaaaaagtgaccttgatcttagaatggggtatgtagaaatgatgattgccaaacttagtttccctactttgacaatcaagtaaaattttttttttttttttttgagacggagtcttgctctgtcccccaggctggagtgcggtggcgcgatctcggctcactgcaagctctgcctcctgggttcacgctgttctcctgcctaagcctcccgtaaatttttttattatagaaatggatggcttttcagattatatatacttggtttctatacactattttatttttgtaaagtagcagttcttttgctcaacacctgaattgcccccacaataaatttttagtttttcttcaatattcaagtaatacataacttttccttttcctgtttaacaaagaaaaaaatatataaagcaagctgttggacctccattgggtgttgtttaccaccactgtaggtgatcgtggcattgtccacctcagtcttctcatggctgtggattcaagttaagaaattcctgaaggtagcattccaggtagtctgtagaacagcccaaactctctgaattagtattatctctgataggtgttttttttttctttgcttttttatttgagacggggttttgctctgtcacccagcctggatttcagtggcacaatcttggcttactgcaacctccacctcctgggctgaaacaatcctcccacatcagtctcctgagtagctgggaccacaggcacatgccaccatgcccagctaattttttatatttttgttagagacagagtttcactatgttgcccaggttggtctcaagattcctgagctcaagcgatgttcccatcttggcctcccaaagtgctgggattacaggcatgagccgctgtgcctggccctggtagttttcttcttatatctttctcctgttgatctcacttgattttcttactagtctacaggaaatttcacgtggagattctgtgcctgtcctctttctggaatatcttccttattttagcatctcaacatgctgttcagcttctggcttgaaaccacccctctcccatcccaaccaagttaagcagcttctttcctgcttagaagtaccataacatgtgtattaatctttttttttttctctctccttcccttcattttaagctcctttttattaatctgtagggcagagcttagaaaaaggtttttgtatattgtaagtactaataaaatatttgtgaagttgatttgggacttgggagacctctcttctgtaagcaactcaataaataattatttaagtaccatcctcacccagtgtactgttagctgctgttatgatattgattactgtaaaattttaaagtatatccttggtagactgttgatcaaagtcagaaagcttgagaaactctgaggcaaaaaaaaaaaaaaaaaaaaaaaatgaagagcatgaaatgattctgcaaactgatcttacaatgatctttctttttttttttttttttttgagacagagtctcactctgtcacccaggctggcgtgcagtggcaggatcttggctcactgcagtctctgcctcccaggttccagtgattctcctgcttcagcctcccaggtagctgggattacaggcacacgccactacgcccggctagtttttgtatttttagtagagatggggtttcactatgttggccagactggtcttgaactcctgacctcaggtgatctgcctgccttggccttgcaaagtgctaggattacaggcatgagccaccatgcccggcctctttttttcttttttcttttcttttttgtacacagtttcactctgttgcccaggctggagtatagtggcgtgatcatagctcactacatcctcagactcctgggttcaggggatcttcccatctcagcctcccaagtagctaggactatagacgtgagacacgatgtctggctaattttttacattttttattttttgtagagttggggtcttatatgttgcccagggtggcctgccaccttgtcctcccaaagctgggattataggcttgaatcagatcccagtgatctttatccctcagctgcatttatatgggctaaattcatacatagtatatcaagatgtcttcaggaagtttaaaaaaaaaaaggtatcaaaaagacagtatgtcatgactgctttatctattttagtctcttagtttttgatactaaagactagaccggagaaatgctttaacaaatcacaaaaatctaagaaaatagacagttaattatttttaaacagtggaagaatttcaatcataattaaagcagcttttgtattttttgatgtcatagcctatagtgaaatttcatatattctgtttgtagatacatgagttcctacgatatgcttgcacataatagaactaattactatttgttgagaacctaacctgtacctaatatacatgtagtttctaaatcaaacattttactttttttaaaaattgtaaaaagcccatagtaaattaatcatgtttaccatttaaaaatgtacagttcagtagtgttaaatacattcacattgttgcacaacagatctctagaacttttttgtcttgcagaactgaaattctgtacccattgagcactaattcccacttccccctccccccaaattcttggcagccacctttctactttctgtttccatgatttttgactgttttagatacttacatgcatgggattaaacagtatttgcccctttgtgattagcttattttgcttagcataatgtcattgaggttcttccatgttgtagcatgtgacagaatttttttcttttctgtaaaggctgtatactatttcgttgtatgtatagactgcattttaaaatccatttatctattggtggacatttgggttgcttggtgatttggtgattcactattcatggttagccaggagtaatatgcagtaaatgttggtatacaaatatctctttgagatcctgctttgaattcttttggatatatggttgcccattgaacaacacagctttgaactatgtggatccatctataagtggatttttttcaaccagccatagatagaaaatatactattcggctgggcgtggtggctgatgcctgtaatcccagcacttgggaggctggggtgggaggatcagttgaggccaggagttcgagaccagcctggacaacatagtgagacctcatctctacaaaaaataaaaaagttagctaggtgtggtggcatgcgcctgtagtttcagctacttaggaggctgagacaggaggattgcttgagcctgggaggtcgaggctgcagtgagctgttattcatgccattgcactccagccagggcaacagaacaagaccctgctcaaaaaaaaaaaaaaagaaaatacactatttgtgggatgtgaaacttgtgtatagggtgggtgggctttttgtatatgcaggttccataggtcagatttgggggtttgagtatgagtgaatttggatgtatacaggtggtcctggaaccagtcttattcttcctcttcttttttttttttttttttttttaattattcgtcttttattttttggaaccactcttctgcatatgctgtgggatgactgtatatccagaattgtgattgctggatcatatggtagttctattttaatgttttgagtaacctcagtactgttttccataatggctgcacgatttttacagtcctacccacagtgcacaaaggtttcgatgtctctgcatccttgccaacacttgttattttctgtttcttttggtagtggccaacataatgggtgtgaggtgctatctcattgtggttttgatttgcattaacaatgttgagtatccttcatgtttattcaccccaaatattttacttttgaatttattgaaaatcatgcattttaattatgtaaaactcaataccatgcatcatttgttaaatgggaaaaggagaatttgtccttatgactattataaaatattctaataaggtgaaccttttttttttttttctttgagacaaggtctcgctgtgtcatccaggctggaatgcagtggcgcagtcttggcttactgcagcctctgcctcctgggttcaagtgattctcctgcctcagcctcctgagtagttggtattacaggtatgcaccaccacacctggctaatttttgcatttttatagagtcggggtttcaccatgttggcctggctggtaataagatgaactttatacttttttttttttttttgagacagagtcccactctgtcacctaggtgcagtggcacgatgatggctcactgcagccttgacctcctgggctcaagtgatcctccacctcagcctctcaggtatctgggattacaggtatgcaccaccacccctagctaatttttgtatttttttgtagagatggggtttcgccatgttgccccggctggtctagaactcctaggatcaagtgatctcccaccttggagtccccaggtgctgggattacaggcatgagccactgcattgggccagaactttatacttattaaacagtatgctgatgataggaaaaaactgtgcaatccttattcataaaattctgatctaaaacgtgttatattaaaattaattaataatgcaagcaaaattggcaaatttatttgtaaaccccattttgggctacttcgaaaattatttatggatcagaaaaggttgggaaatacttttctagagtaattgagcaggccctgtagatggcagaagtgttgcttgaactggcgtagaggaagaaagtgttgaattgccccacttaattccttaagtaattttgcctctttggagaatatttgcctgaaatagagaactcaagttatgctatgaagattctttttgaaaaatagagacagggtctcacattgcccaggctggtctcaaactcgtgggctcaagtgaccctttcaccttggcctcccagagtgcagggattacaggcatgagccatcatgccagaccaagaagatattttggagggctacatcccaccagtagcttgatgttgtacaaagagtggtaggctctgggcgaggctctgccattatactagttgtatttccttggcacgtagcttttgtggatctctcctcttcatggtgacatgaatgagatgaataaataatggaacaacttgtgtttactgagtatctaccatgtatgtgcctgcagagaggatgtcttcattttgcagatgaagtaattagtaaataacttgcctaggttccctcaggtagtgggcccttgaagaatgggcttttatggccaagtgcattggctcacgccagtaatcccagcactttgagcggctgaggtgggaggattgcttgagcccaggagttcaagaccagcctggacaacaaagtgaggccccatttctacaaaaaattagccacatgtggtggcatttgcctgtagtcccagctgcatgggagagtgaggtgagagggtcgcttgagcccagaaggtagagactgcagtgagccgtgtttgcacccctgcactccagcctgtgtgacagagtgagactgtgtctccaaaaaaaaaaaaaaaaaaaaaaaaggctattgctgcctatagggtcctttttagtgcaaatactaggattctaagcacttggtttctgttacccaggtcaaactatttctttggagagtttgattaccatcacaggtgatggtaagattctccctagctggcatttaatccagtggttatatgcatctttcccaaattctttatcaagttggtcaattcatagaacatctaatgctgattataagcctattatcttgcttgtgtctctgcactatgggcataatagcacctaaaagcttttgctataatggactatgatgtatctgaataaattacctttataaacaatcaaatctaaattggcaagttcaaatttacccaatttttcttatagaatttacctttgcagttaaagaaataattgttttttaccatttgtctagtatgacttgttatttacaaatagcatgtaactggccagctgtactatacacattttctagaaaagaaaatttcttcaaatttcttattgggtgccttagtcttttacccattagggctattcaaataaagaatgagatattctcttattctctagaaagagacattctatactaatggaaataccaacttttaaatctagactaccaaaaaaaaagtcatgtttttctaccctagaggctatagattcttaatgtcagccactcatcctggccctctcattttcttcttttcccatatggaagttctagggtgatatagtttggctctgtggccccacccaaatcacgcgtcaaattgtaatccccaaagttggaggaggggtctggtgggaagtgattgaatcatgggggcagacttttcccttgctgttctcctgacagtgagttctcgtgacagtgagttctcgtgagatctggttgtttaaaattatgtagcacctgccactttgctctctcttccccctgcatcagccacgtataatgtgctggcttcccctttgctttccactgtgatgataagtttcctgaggcttccccagccatgcttcctgtatagcctgctgaactgtaagcaaattaaacctcttttctttataaattacccaccctcagctctttatagcaatgtgagaatggactaatacagaaaatatgtaccacagaagtggggcatcacaataaagatacctgaaaatgtggatgcagcttttggactgagtaatgggcacaggttggtacagtttggagggctcagaacaagacaggaagataagggaatgtttggaacttcctagagacttgttgaatggttttgaccaaaatgctgatagtgatatggacagagatggctaggctgatgaagtctcagatgaagatgaggaacttattggggaactggagtaaaagtcactcttgctatgtgttagcaaagagactggcagcattgtgctcctgctctagggatctgttgaactttaaacttgagatgtttagggtatctggcggaagaaatttctaaaagcagcaacgtgttcaagaagtggcctggctgcttctaaaagcctgtgctcatttgcataagcaaataaatgacctgaaactggaacttaaatttaaaagggaagcagaacataaaagtttagaaaatttgcagcctgccatgtggtagaaaagaaaatctcactttctggggagaaattcaagctggctgcagaaatttacataagaggacgatacatggggtaaaatgctttttcctcccctaaaagccttggtattaatctggaaatagcaggaaggtaactgtaggaattatataatgggtttccctgtgcttggtcatgtctttgtatcatttccataggtcagtggagactcagaaaaccagtttctctgggcttttgataagtaatgttatagtaatcaacagatggtaactttcggtaaaacaaattgtcttcatctgttttgtgctggtataacggaatatctgagactgggtaatttttaaaattatttatttatttatttttgagatgggagttttgctctttttgcccaggctggactacaatggtgcgatctcggcccactgcaacctccgcctcctgggttcaagtgattctcctgcctcagcctcccgagtagctgggattacagttgcctaccaccatgcctagctaattttgtatttttagtagagacagggtttcaccatgttggccaggctggtgttgaactcctgccctcaggttatctgcctgcctcggcttcccaaagtgctgggattacaggcgtgagccaccacgcctggccaagactgggtaatttataaagaatagaagttggccaggcacagtggctcacgtctgtaatcccagcactttgggaggctgaggcgggtggatcacttgaggttaggagttcgagaccagcctggccaacatggtgaaaccccatctctaccaaaaaataaaaattagccgggtgcgttgatgtgcacctgtagtctcagctacttggaaggctgaggtgggagaatcacttgaacccaggaggtggaggttgcagtgagacagaattacgccactgccctctagcccaggcaacagagtgagaccctgtctcacaaaaggaataaatatatatatatatgcatatatgtatatatatatgcatatacgtacatatatatgcatatacgtatatacgtatatgtatatgtatatatacatatatgcatatatattatatataatatatagtgtatacaatatatgtatatacgtatatatatgtatatatgtatatatatgtatatacgtatatatatgtatatacacatatatatgtatatacgtatatatatttttcacagttttgggggctgggaagtttaagatcaaggtacctgcatctcatgaaggctttcttactgtgtcctcttatagcagaagatagaaggggcaagctgggaataactccctcagtcagactcttgtataagggcattcacaaggcaggaaccgtcgtggtctaatcacctctgaaaggccccatctcttaatactgttacatggacaacacctgagtttttgagggacaccttcagaccatagcacagatactgacaagtctcatcaattattaagtaaatagtacttgaagggtttgaaattttgtagtaccccggcagtgtgtttatatttgtgataaattttaagtataggaaaatcatggaaagacttactgctcataactgccgtacctcgtttacctctatctttccctaaactactactgttcttagcaagatcatgaactgtggggccgacataagccagaggagtttctgaagagtctgcttcagtgaggggttctgttgatagccatagaataaagaaatggcactttgcagacattggtacttccttgaaagaactggctgtggcatatacagaactcaaaaattgaaattactagataatggttacttggtttagattgcctggaaattatgagaggttctgtaaatgctttgggattagtagtttgaaccacctagtccattttatgattctgtcttcagaatatagaaggaattgcatcttatttggggattaggatataaagttagtgtacaaggcaaaatagcatgtaggcaaagttacccatgcagagtttgtgggaagatgccttaccacaaaccagtaccttctttttaggttcaagaccagcccatttttcctctagaatgagaacagatcattgctcttctgttgagcacagagttgttggtttgtacttaagggcaatcctgttagaatcactcctgagtggctaaatatcttcagtctgagagacttgtccagcaggttatgggaacagcagattcatgtcacctgtctcttgctcacttaggcaaacgcttagtgtctggaatggtgggtagaacccttgtatttactaccaaaattgagctttctctgacatttttgctcaatgtatgttagatttgtgtaagttaaattagatgttggcttatgcgtggtataagatttaaaatagacttcttagcaaaaagaacacctggtatcagattgacttaccccttcattttgtttgcttttattcagtgaagtgttgaaataacaggtatctcatgtctcatctttgaattataatgaattttgtatcatagctttagtttctggtacttttttttttttttttttgagacaagtctcgctctgtcacccaggctgaagagcagtggcgcgatctcagcttaacgcatcctctgcctcctaggttcaagcgattctcctgcctcagactcccaaatagctgagatcacaggcacctgccaccatacccggctaatttttgtatttttagtagagatggggttttaccgtgttggccaggctgatctccaactcctgacctcaggtgattcgcccgccttggcctcccaaagtgctaggattacaggcgtgagccacttggccccagcctctgatacctatttttttccgtttttcctccaacagtgtttctgtaaactgagtatatactcgatgaaatgagaagatttaacttataaaatcgatttagtatagttttcaagaaaaacttaaactttttttttctttttttccttttttttttttttttgagacagtctcactgtgattgcccaggctggagtgcagtggcacaatcttggctcactgcagccttggcctcctgggctcaggtgattggttctcccacctcagcctccagagtatcttggactataggcacatgccatcacgcctggctaatttgtatttttagtagagacagggtttcaccatattgtccaggctggtctcaaactcctggactcaggcaatctgcctgccttagcctcccaaagtgctgggattacaggtgtgagccatggcccccagctgaaaactttaacctttagatgtcaattcagttagtgagtctgttttatctgttgttcaagcaaattctttaaaacacttaaaatagttcagttcttcagttggttgaaatttatatggccatttcttttctaagcagtactctcagataaacaccagaatgctggtctatggacttcagtttgaaatcaatagtttactgtcttgctggaaggaggaaagtgatcttactgttgtggaaaatatatcactgcagaatctactcacttttgctgcaacggtcaagttaatgttttctatcattcagctaagattgctaaattagtataactttcctttgcctttgaactttttagcactacagaaaccaggactacaaatatgttctttacttttttctgttattttcccctatcatgagacttcttgaaggcgaatgctgttcattatgctttctcatctgtactttcatgtacatgtaatccactgtagtgaaggcactaaaacctgttgtattttccacatttcgatagatctctcacaggatttaacacttttggaatgctcagtaaattattattgactgcttgataatacctctttgttcctgcctttccccaagtccttcaacagaagtttcttctagcactttgcaggtcagttgagtggactatttgagtccctcacagtaatgagcttgtgtgtttttgtcattcttttttctttttttgaaaaaacaatagagtcatttaaggaagcaaaaaggtccctgggtcaagatttttattttatcttttatggtggtagggtgaggtgtgagtatttagggagatggttggtaggatggcgttgtcttagggttgcaggaggatcagaagggtgactgtaactactgatgatatcttacagtggtgaaggagaagataagtgaaaacagaggcaatttgtttaaacgaattttagtagatattagtctcttaatttggcactgacatatgacagattatttcatttaaattctgtagtttgacaggtataataaagtacccttcattaaatattcttcacatatactcttgtttgcctttttctagttgcaagagtggtgatttctatgtttcattataaattttagaaatatataatttgaatatattgtctgttctaggttctctgtgagtcaagaaaaggcagggtattatgacttcggattcgtatgatgtctggatatatttaaggggagcagttctcaaagtgtggcctgggattatgggatcaaaactattttttctttctttctttcttttttttttttttttgagacagggtctcactctgtcatccaggctggagtgcagtggcgacatcttggcccactgcaacctctgcctcccaggttcaagtgattcttgtgtctcaacctcccagaaactattttcataataatactgagttgttccttgcttttttttaaaaaaacaaaacaaaacaaaaacaaacaaaaaaaccatgttggacatttgtacccacggtgcaaaagcaatgaataaacactgttggcaccttagcacttgcagttaaaaaagccagttttgtttgagaatgtccttgatgaagtactaaaaatgattaattttattaaatcttgatccttgcgtgcatgcagttgtaacattctgtgcaacaagatgggaatgtgtgtaaagtgcttctgctgcatattgaggtatgttgggttttgagcaaaagcacttacgtgattaagttgtgagctccactagccacttttttcatggaaatttcatttttacttaaaagagggtctgacaaaccatgattattcagacttaggtatttggcagactttttttaaatcaatgaagtgagactgtcacttcaaggaaaacaactgaccatatttgttggcagagagaacatttgggctttcaagcaaaaattaaaatttttggaaaacttttgtctgttactgtgagcatgacagcttcccagtacttaaagactttctgatgagattaatgggtttaacaacatgattttttgaaatatgccaacttctggaaaatctgcgtaactcagtggaccagtactttttagatgaggaatgatgatttataacattgtgcctgagttaaagattcatttaaagtgaatagactaatgaatgttaatgtggcagagtaggaaaagttcactgatacaatttcggattccatgttgcatctaatcttgtaagaaagaaattaccactgctaactgaagtatggtggttattttgaggaaaagcacctgtgagattgagttgtgaactgaactagccactttttaatagaactgttttggtgtaatatcaaagcacgagatccacaatgacctcagaaggctattcaaacactctcccttttctaagctaagtatgtttgagactggattttcttcatatacttgaaccaaaacaacatattggaacagattgaatgcagaaacagttacgagaatccgtttcctattagacagatattaaagaaattggcaaaaatgtaaagcaccacttactaattaattttttttttttttttttaaataaaagaaggctatgttgctcaggctggtctgaaactcctgggctcaagtggtcctcctgcctcagccccgcaaagtgctaggattataggcatgagcaaccacgcttgccctcactcactaattttttttaaaggaaaataagtttctttttaaaaatgtgttatttatattaggtacagttggccctccatattttcaggttcagcttctgtgcattcaacaactgcagatcaaaaatacttgtggaaaaaagccaataaaataatagaacagggcgggcgctgtggctcatgcctgtaatcccagcactttgggaggccaatccgggtggatcacctgaggtcaggagttcgagaccagcctggccaacatggtgaaaccctgtctctactaaaaatacaaaaattagctgggcatggtagtgtgtgcctgtaatcccagctactcaggaggctgagacaggagaatcgcttgaaccctggaggcggaggttgcagtgagccaagattgcgccactgcactccagcctgggtgacagagtgagactctgtctccaaaaaaaaaaaaaaagatacaaataatacagtataacaaggatttatataacattttacattgtattagatgatcataagtaatctagagccagatgatttaaagtataaaggagaatgtgcataggttatatgcaaatactgtgccattttatataagagatgagcatctgtggattttggtatccatgaagttcctggaaccaataccccctagacccccatggatactgagggcttgctataacagtttttaataaaaataaaaaacaggccaggtgtagtggctcacacctgtaatcccagcactttgggaggccaaggtgaggtgattgtttgagcccaggaattcaagaccagcctgggcaacatggcgaaaccctgtctctgctaaaaatagaaaacaatagccagacatggtagtgtgcacatgtggtcccagctacctgggaagttgagatgagaggatcacctaagcccaggagggcgaggctgtagtgagccgtgattgcgccagtgcacttcagccagggccagagtgagaccttgtctcaaaaaaataaaataaaataaaagtaaattgtaaaaaactctttagtttttcatttctattatgttaaatgttaatagctataacacatataaactaaacaggtcatgagaccaaaatgctgaagaatggtgttaatggtgttcttacttactttgaattaccgtttttatttttctatgctagctaattactatgtgaataattaacctcaatgaagttctgtattctctgttgtagcagtggctgatttagggctcagttgtcttttgacctgttcttccttctcatatgattgcatctcgatttttaattttagacttagtttttaattctaaaattaaaaatctttttttttttttcttctatgcccactgctgtcaacccagtcagggcccttatcactttattcttgaattacttcagttctccattttttttctcatgtggtgtttttcaaacttgagtgttgattggaatcccagggttaattcaactttaattttatgaatatgatttcatataagttccttatgataaaaccagagcagatttacaaattaaatatagaccatcaaattagctgtacatatttaaggatgagattttgttaaaaccaaatagtcaatgttagagcttatagaatggcatagcctcaggatcagctttataatcagtttttttaaatttggcttgataatactaacagagaatggctatttgcataaatatgttttataaaatggtgttaacttttagtctttgttcaggataatgagacctactagttaaccagaacggggccagcaagcaactcttgaatgctagttttaatgcctgatcaaaattctgtaaagctgtgttgatcactgaggcgttgcggatatactgagcctgcattaagtggatatttaatctaattatttctggaatctttaccagaaaacatgctcttacatagtttgctcctgggtttgctgttggtgaactgccgttggttggtgggatctctgtgtcccatgggctttgccacacagctggggctctgagtacttcagctcacattcctttgtttgccacccttgccttaactcacttacctgtattgttttttctcccatagcactcaacatcatcttacatgtaaacattttactttgttgttgttgttgttgttgttgttgttgtttttgagacagagtcttgctctgttgcccaggctggtgcagtggcacatcttggctcactgaaatccctgcttcctgggctcaagtgattctcatgcctcagcctccttagtagccgggactacaggtgtgtgccaccactcctggctaatttttgtatttttagtagagacggggtttcaccgtcttggccaggctggtcttgaactcctggcctcaggtcatccacctgcttcagcctcccaaagtgctgggatcacaggcatgagctactgcacctgacactttgtttttaactgtttctgtccaactagattttaagctgtataagggcacagatttttaattgttaattgctaagtcttcagtttctattgtagtctctggcttgtattagatgctcaataaatatttgttgacttaatgaatgcatattaacccttcttttctttattcaactgcaaactcaaatactcttttctgagttgtgtgctctcactgtgggtaaagaccagtttttctcttcattttaaacacaactaaactggccctgaattgtatagaatccttttgatttgttgtttgatcagtacaagttcagtcagtggcacagttacttcccttgattcagattctgtagaagcctaaaagtgcattatctcttcaagtagacatgtcatcatataggctgctatggagatctttttttttccttttaaattgtttgtgtaacagtttctgttttaaaacagtggaattaccagcctggacactatagtgagacactttctctacaaaaaataaattaaaaaaaattagctgggtgtggtggagtacacctgtagtccccagctactcgagaggctgaggcagaaagattgcctgagcccaggaatttgaggcttcagtgagttgggattgcatcactgcactccagcctggacgacagagtgagaccttgtcccttccaaaaaaattgaaaaagtagaattatatttgggagtttttttcctcaaattcctttgaagttaagatttataaaagtatgggaggccaagctgggattatcatttgggcccagatgttccaggctgcagtgagctacggtcgggccacggaactccagcctggggaacagagtgagccctgcctcaaaataataataaaaataataataatagtacaagctctcttaattactacctgttttttttttgagacagagtcttgctctgtcacccaggctggagtgcagtggcgctatctaggctcattgcaagctctgcctcccgggttcacgccattctcctgcctcagcctcccgagtagctgggactacaggtgcccgccaccacgcctggctaattttttgtatttttagtagagatggggtttcaccttgttagcaagaatggtctcgatctcctgacctcgtgatctgcctgccttggcctcccaaagtgctgggattataggcgtgagccactgcgcctggccactacctgtttttttttttaatcctatgtttttaaataattctaatcatctattcatattttttgtttctcctatttaacattttatgtaacatttttagattttaaaatttgtttctgttatcacttctaaaagtgaatgttatttttaaaaatgaatgcctttacattgggttgttatgtaacctaatttgctttaacaaataactttattttggagtaattttatttttaattatttatttatttatttatttatttgggacggagtctcgctctgtcgcccaggctggaatgcagaggtgcgatctctgctcactgcagcctccacctcctgggttcaagcaattctcctgccttagcctcccaagtagctgggattacaggtgctcgccatcatgcccagctaatttttgtatttttagtagagactgggtttcaccatattggccaggctgctcttgaactcctgacttacgtgatccgcctgcctcagcctcccaaagtgctgggattaacaagcatgagccactgcacctggcctattttggaatacttttggatttatatagccatggtatatttgttaaaactaagaaatcagtatcagtatgttgtcattaactaaactcaagactttatttggattttgccagttattccactaatgtctttctttggttggttggttggttggtttcaggatccaatccaagataccacagttcatttagttatcatgtctcctaagtttttctgatctgtggttgttctcagcatttccttatttttcatgacctcttaatcgttttaaagtgtattggtcagatgttttgtaagaatgtcctttgatttcggcttatcggatgttttcttatgattaggctgaagttatgggttgaggtctgggggaaggataccacagaggtgaaatccccatctcatttcatcacatcggggagtacataatgacagcagtacttaccattgctcatgttaatggttatggttttttttcacagaaacattactgtttccctttccagactcttctttggaagtgaatcattgaatctagctcacgctcagggggaaggaaattgaattctccctcccagaatggggacatacactcatgtatcagttggaattcttgtcaggagagttgttccttctcctccagttgtttatttaatcacttatttatatcatagactcatgaataattattttattctgttataatactgttatgatttactctgctgctcaaattattccagctttggccactgagagtttcttctgtttgcttccagtctcggacctatccgtctcctttcatctttggagcatttcccttcttctactggcttgccttgtagtttccctgtcccaaccctagaatcagctgtttctgcagaccctgcttccttgtatttattggaaggtggtatttagaaacaaaagtcttgggtgcagggtatgcttattttattgctcctggggtgtcactgcttccaggccctctgttggacagaccctggaaatgcaggtatttcagctaacctgcatgtgcatacatacctacgtttctgtatctatccgcatatattttaaaatacacgtgagttcatattgatatatctgactaattcatcaccacctcttgcttatttgtaacttctttctgtgacattgagaaacttggcacacattatctacattttatttacttatttgtttaaccctagtgtacatgtagagtattttcagaattacagactggtacccttatgagaaacaaatttaccagctagagtacagagtagattgtccaaagttctgtagattagctccccccgacctcctgctccttccatgagattatctcataaaattataatactgttagacttgctgtatagtttgcattctatcctgagatcccctgacatcctgttttgtttttatttgcatacagtttaccatttaaaaaaagtctttatattgagttgttaactttttaatataaatgttgtaattcctgatattactcatctgccatttatgtagttgatagtcactacttttttttttttttttttttttttgagatggagtcttgctctgtcgcctaggctggagtgcagtgacgtgttctcagctcactgcaacctccgcctcctaggttcaagcgattctcctgcctcagcctcctgagtagctgggattacaggcgtgcatcaccacgcccggataatttttgtatttttagtagagacggggtttcaccatgttgggcaggctggtcttgaactcttgacctcatgatccacctgcctcggtctcccaaagtgctgggattacaggcgggagccacagcgcccacctgatagccactacttttttaatgctgatatagtgcttaccatctgtcaggcactgtctatgcaccgtaaataaatttacttctcacaatgactctgaggtggaggctcttgaattagccttttttcatgaggagagtgaggcacaaagatgtgcagtaacttggccaacttcacacccagctgctaagtgggagaacttggatctgaacccagggaatgagctttggagtccaaactcttgctttttgtttaatgctgtgtataggacttagaattaatacaactaactcttctcttattagtttagtttattacttggaatttggtgtgaaatagagagtgctgctaccccaattctttgccccatgtgtgtaacaggcattattaatcatgacagcactctctctgctgagctagaacatggcctggcctaaggccaataatccttatggacacaaccctcaaagtggttgtatgagatgaactctccttgccatctctgatcttgtctgttttgaatcctgattctagtgcccagtgcatggcactgcgtgcctgcttctcctggattcctctctcatggtcttcctttttacagggacaggttttctatattccccctcaggcataggatctgtttctcttaagtaattaatttttatcacttaccaataatttaacatctatatgtctaagttctctttatattgtttttcttatccttacctacaaaatctcatttaccattgatttaaatttcagtatattgaaacaatggattgtaacattaaaaataaatgaaattgccaaatgatactaacagctgccttcaaagcatttaaacatacaaacaggcactattgaagactggagagttatcaaaattggcaattttttggcagtcttgctgtgaagtaaacatttttaaaaggaaggacattgagaatattgtaatcatattacttacatcttgttgggtttggatttgaccttacatagcctggtattcagttaagagtcaaagttgctgctattaatttagttgagaaggataaatagtacatgtagtttattgttttctttagagaaatagaaacagaaacatttatttggccagaccaaataggtggtcattcccttgatttagcaaatccttgaggtagaattttttttttttttttttgagacggagtctcactgtgtcgcccaggctggaatgcagtggcacgatctcggctcactgcaagctctgcctcccgggttcacgccattctcctgcctcagcatcccgagtagctgggactacaggtgcccgccaccacgcctggctaattttttgtatttttagtagagacggggtttcactgtgttagtctcgatctcctgacctcatgatctgcccatcttggcctcccaaagtgctgggattattggcgtgagccaccgcgcctcccggtagaatttttaaagaagcaataagggctctgacaatacctatgggacttttttcaaattattcagttattggcagctgggtaaagagggacaggaatgtctgatttaggtaaatacctctcacaagtggagtaggggcgtatctggtagagaacagtgctgattccttggacttgtgtggcctggccacctgagaggtaggtaggaaggtgtgtcttggccatgtcctggggcctctgtaaacctgagaggatggaggaagctctactttttctgacgatgctgttggtgataatgaagtaggctatgagagcccatcttccattaattcagatgttcctatacagttggccctctgtaaatgggattctacatttgtagattcagccaactgtgggtaaaaatacttgaaaagaaacaaaagtgtgtgtactgaacatgtacatacttttttcttgccattattccctaaacataatagtttaacaactatttatgtaatatttacattgtattaggtatttagtaatctagagatggttttaaagcaggggtccctagtccccaggccgtggactggtacccgtctgtggcccgttaggaactgggctgtacagcaggaggtgagctccgcctcctgtcagattggcagcagcattagattctcacggaagcgtgaaccctattgtaagctgcacacgtgagggatctaggttgcacactccttaaaagaatcttttttttttggagacggagtctcgtctcactgtgttgcctaggctggagtgcagtggcatgatcctggctcacctcaacctctgcctcccaggttcaagtgattctcctgcctcagcttcctgagtagctgggattacaggcacctgcctccacacccagctaatttttgtatttttagtagaaacagggttttaccatgttggccagactggtctcgaattcctgacctcaagtgatctgcctgccttggcctcccaaagtgctgggatatgagccaccatgcctggccatccttatgagaatctaactaatgcctgatgatctgaggtggaacagtttcatcctgaaaccatgtaccctctcccctctttgtggaaaaactgtcttccacaaaaccagtccctggtgcaaaaaagttggagactgctggtttaaagtatatgggagaatgtgtatacgttatgtaatagtgtaccattttatatcagggacttgagtcttcgtggattttggtatctgttgggggtcctggaactaatcctccgtggatatggaggaacaactgtatatatggtctcagtaataaatacgtatctgagataccctctgtattaagaaaaaaaagatgggaatttcttggctcatataactgaatagttccgaaatttgggaaggtctgcctgacttagggcttaggtcatgagactacagttctttcttggctttgacttttgttttttgtagttgttgactctgttctttgaggctcttctccaagatggcttccaacaagtccttgggcaaacatttttccaggtttagacctaaggggagaagagtgagcattcttgtcctagcattgcaggaaacctgagattttcactgtgactgcactgattgtggccgtgtatctaaccctgtactggtcactatgtctagggagatgtaccttggtcaggccagggtcacaagcagcttgagtcagcttcctccagtgtacttggtagttctcagagaagagttggtgtgaagttcccaagagaagggtgaattgaccctgggtggcaaaaacaacatagcatctactctagtgggataaagtaagatggtaaggcatggtgttcagggtatttctgagtttggtttgattcacaaaatagattgtgaacactgtaattgcccttaattttagttaacctatgtaaatgtaaatctgtgaggtgtcactacattctgctaaagctttgatgggctcctgccatattctggtttggcttttgtattaaagagccattgttgttttggtttcactgtatacaggtagacttttgttttaatgaatagaggtataatctgttttgaacaggaaaagctgcttttgtattctggataaagttcatactagtgggatttcacctatgaaactaaacaaatctttgaaaaatttaaaaaccatatgtatttacacagtgtccattcagtagaagtcgtttaaataaaggcttctgccaatatatgaatatttagagctgtattttattattttactttttttgagacagggtctcgctctgtcacctaggctggagtgcagtggtgtgaagacagttcactgcagtctccacctcacaggctcaagagatcctcccacctcagcttcctgagtagttgggaccacaggtgtgcgccactacacctggcttgcttgcttgcttatttattgatttgagatgggagtctcactatattgcctaggctggtcttgaactcctgggctcaatcctccaaccttggcctcccaaaatgctgggtttacaggcttgaaccactgtacgtggccttgaatctgtgttttaatactatgcttacttggctgtggtgttgtgaaaagatcactgaaaatggagtcagaggcctgatttgagccagtcgtttgttgtgggggaaggaggtcaggggagctaacatctaaaggctcactatatgccaggcacagaaccaagtgtgtttgcatgtatatttcgtttttgttgccagactttgaggtaggttttatggataaggtctttaaggcaatatcagcttccttttaaaaaagaaattccggaaactgagttttaggctgaagatctctaactggtagtagggacaactgaaccacagggtcctaactgaccctgcgatttatctccttttgcggggggtttcttgataatagggtgcactttacctcattttttggctcaagcatggataggccacccttccttttcatacctatagctaagctttacaaatgatatgctgataagatacaagctactcgttattcatgtgggttaatagacctgtttgtttgcttgtttttaagtctatagccgccccacccccaatctacaatttcaccttctaaggttttagttactcattcaaactgcagtctgaaaatgttacgatattttgagagagagaagactctagctacgtaacttttgtaacaatatattgttataattgttcattttaccattagttattgctgtcagtctcttactgtgccttatttataaattaaacttcatgggtatgtacgtataggaaaaaacatggtatatttagagtttagtactatctgcagctttaggcatccgctgtggggttggcggggggcggtcttgggagataagtggggactactgtacaattatcaggcacacacaggctctgggattttacaaatgagtaaaagtggttcttgctgttgaagcacttacagtgggaatagagtgaaatacatgaaaatgtgattttaatatgttataaatgctatgatggtgggagtttgttttgtgtaaaacatccttttaattggtactttaaattttaatattctttcacaggtctacctatttagtcttacactttcaaagaactacctggatgctgtagattttcatgatatactttattaggtatgttattaatggtagaaacagcatggaaagtcttccagaatattagacaaggacagttctagtactaaaacataaaatgctaactaatgtcttcatcaagacataaaatatgtatcttaaaaaataaattgtaagccaggcgcagtggctcacacctgtaatcccagcactttgggaggctgaggcgggtggatcacaaggtcaggagattgagaccatcctggctaacacggtgaaaccctgtctctactaaaaatacaaaaaattagcctggcgtggtggcgggcaccggtagtcccacctacttgggaggctgaggcaggagaatggcgtgaacccgggaggcagagcttgcagtgagcggagattgcaccaccgcactccagcttgggggacagagtgagactccatctcaaaaaaaaagaaattgtaataacacccacattatacatcagtgaaaactaaacacgttactaccctaggccttattgcacaggggtgctacctccaaggagaaatttgtctaggcagcagatggactagaggtgattagcctatgagcgaatgaggctacagatcattcctttttatctgattccttttctttctagttcctaggccttggaagcactaagtggtcttaagtaatttgcatagaattagttgagttcatctgttaactaactagcagataggaagaaaactattgtcatgaaattatttaaaaaataataatgctccagtttcttctcatctttgatgtcctttggtcctacctcactgccttcctaacaccattttctgctttacctcaaagctggggtcatcttgagtttagcctgcttaatccgagtgactgtcagctttattccactttagcaactcgcaggcaaggccacacttggaaacttttcacttggaatagttctatcttggtgatttcatcagccttctttatgtcaaatacactcaaattcctgcccattcttatctcttcgttcccttcaggtccttagtccttttaatttgtgactttcattctccaggtccattcttattaaatgtctgccagccagactttagttgccccctgtccagctttctcttgctcagacctaagatttctttaggttctttctttgccttttgaaatccagctcagcttttaagattgagttccttgttacctttcctgccatccttctgcagttcctaatattcttttctttctcccaaagtgcttttgtataaacagtcagccttccatatccgtgagttccaaatccatggatcctgaattcatggatttaaccagctgcagataaaaaatattcagaaaaaaaaagatggttgcatctgtactgaacatgtctgtactgttttgcttgtcattattttctaaacaatacagtataacaactatttacatggcatttacattgtattagggattataagtaatctagaggtgatttaaagtatatgggagtctcttatatcccaggaagccaggtaaaaaaaaaaagtatatgggaggctatgcataggtgatatgcaaatattacaccactttatatcacggacttttgagcatctgtggattttggtatccgaggggtgtcctggaaccagttccccagggatactgaagtatgtctgtctatctcatactatatttttccctttgtcttaggtagactatcagctccataggggcaaggatttaataatatttgtatattcattttattcaagttcgtatacactgcttgggtcataatatttattacatgcttgagaaaatgaatttcttcgcccctttgttacagctctgagtaaacagccatctgccttctctgtcatctgttggtggttgagtatttctgtagaaagttacccattggcctcaggactcttactctaaatcttcttcttaggcagttttctctgtgcatgaagtttttatgtaaacaaatagatgaagcctgccctactcatttatttgctcaagccagaaagtcaccttcttcttcactttccatatttaaatcatcatttggtggaattttggcctaagcaactcttgaattcacgtacttttccctgtcatcgccagtgtggtgtagaagcctctgtcaccccttgtcgggatgctgtgctgcagcatcatctaacctggttgcagttattctttcactccctcaccgcacacccttttacttaaaacactaaaagtggcttctcattgttcttaagataaagcacaaattgttagtgtggcctgtaaagctttgcatagcctgacagagaatgtcctgctaataatttgaaggtacaggatgattttaatactttaggagaaaatgttctaggaaaagacgcttgtttagacttaaggtgaggactctgcagtatgaattagacatctggtgaactataagctgtccccgcatttaaacataattggttctgagagcctgcaactaaagataaggcagaagaatttactttgcatttcctgcattcctcttttcgcttgatagcagaaacccctcatgttaataaaggtggcacaagaggcaaaaatacagactttatcacagtgtttaaggagaggtgcatgattaagtgtgtggggagagagtacctttgtacattttattatatggtgaactgtatgttttctacttttagtactgtttgtaaattttacttcttcttggatttacctttttcagttatattattccattatgccttgctactgtaacagctaatgatgaaaaacaggatctgtctttatattttcttccctccacaaatgtggatctcatagagttgaaaactaggttgtgatatagtatagtatacctaattcctgtaatgggatcatgttcctataatatggccgcaatttagtgtagaatttttgtaaataaaagtgtattttaagtttaacttaaactttcaatgaagtgttttaaggatttaaccatgcagcacaaatgagcacctttctgtaaatgccaacagtgtaatatgtgtcatttcttcactgattgttagtttgctgcggattaaaacacaggtgatcatattcaggctggttagattagtgattttaatatgaaaccattgcttttagaataatcatgggccagactgggaagaaatctgagaagggaccagtttgttggcggaagcgtgtaaaatcagagtacatgcgactgagacagctcaagaggttcagacgagctgatgaagtaaaggtataattttatcttttgtgaaaatgaatatacaattaaggataggttttttcccctcctaagttcaataagtttttatttaaaataattctagccaagtttgtatttacaataagatgagtgaatacttggaagcttaggttcttgatctgtcttaacattataccatgcacattaatcagtctttgtttagtatacttttatttgcatatgcagctgcagaaatgcctccctaaatataaagggatgcatttcatgattttatgtttctaaagtcattgtgattaaaaaaaaaaatacacacacacacacacacacacacacacacacacacacacacacagtcaacaaagaaaggatggcaatcgtttcctgttctctaaccacttgcaataaaataacagatgtggtgtttttgtattatttgaatgtgggaaactatagtgtaaaatctatatgcacctaagaaaatgttcttgatatttttgaggatacactagatttttaacctgctttacaggtgttatacattttctaacaatgaacaatttctcctttcctctccttcatttttttttttaagagtatgtttagttccaatcgtcagaaaattttggaaagaacggaaatcttaaaccaagaatggaaacagcgaaggatacagcctgtgcacatcctgacttctgtgagctcattgcgcgggactagggaggttggttaacataacatgttgtagtaattatcatcatcttttggtttatgctattggaacatttgtttggttattgggaggaaatcattgacctcagggtgtccatctttttattgctatttctttttaatgtgcaactgttaatgactgctgtagatcacactattagctattcctataacagagttctaagtgtttggaatatactttgaactaggtagatgcctagattttataagaatgttgatttaaaaaaaaaagcttttaaatcaaatactctttaatgtcctcatcagatcactatttagagcaaggttttctgactcactgttgtaaccccaatttgaattagccatgtggtaagaaatgttttaatattcatggacaagaaagctttttattatatattttgttcaaaggctaagcctctctataagaatttttaaatttcttgttgagagattggaatttctttttctatagtactttctgaacgagctagctcttaattactccaagagtttcctattttcaaagaaaggcagtaaatctatggtagaatctataattaaatatcccgttaaaacatgattgcagcaagatgagaagaaaatggcaaaagtctaaatagcttaggcatttctgtttttaagtgcctgtgttgtatagaaagacatggcataggatatttaaaggggagttgaagcaaaaggggaaagagcgagttggaattaaaattgcactatgtagtagattgtttatctgaatgtctaaatatgggaagcacctaaacaatggaatttgttttaagataatttttcaacgagtagccatttttaatataacattattgtaacaagcaacaatttgctattgtatgaggccttctggagattgtgtgacatatgagcttcaaagacttgtcagtgatatcccagtagcaacagacataatcctaatgcagattttagtgatattctggtggtcttgatggtgacacttggaatgattcttagtcatttatgcgttttgttaggtgacacctctgtaaagctctgacttataattgtataaatattgattatacagtgacactttcctcctcatctggtacaggccagagcctagatgttagaggtcagtggcatgggggaaagggattctttttgatgcccatcagaacgttcttaaagggaataaggatggggcttttaagtaattgctttgaaagtttttatttggtgaccttttagaaatgttgaattgaaagaaaaacctcattttctctctggaggaataaatcttagaaatttggagaaattaggtagattcacatggaaaacttatttttgccacccattatgaatctcagaatgctatcaaaagcctaacttaggtttataataaaagtcaacagcaataatgaattgtgtcactgtgctaggtactttgtacacattacctcttttaatcttcatgataaggaaggagtattacacttttttttttttaatccaggcaaggaaactgagccttagaagcatttagtcagtttgcctgctctaatgatctgatgtgggcccagaagagcacactttgctcagacacatgaagtattagtgaagtacattattgacatacaacttgaattgctcatagtatatttggcattaaatttaagagtattgtttgttcaagtggatatttactaattgaaattttcttttaattttgtcaaatggagacaaatcgttgaatataaagatacctaatgttcgtgagtttatgtgaaaaattgggagaagaaatcagcattttaataaaacaaaattgttttctaaagttagtacttccacagtaccacacacacacgcagattgagaataaacattttcacagagtatgggggaaaaggaggaaaataatccccagccttaggaatccagtttttgttgcatagaactctgacctgattaaggtcagtcattttttttgttgctggtgttggtagctgatcctgcttcagatgatccatctattatttcccctttccgcctttttaaaccatcaccactgacttttagaagccagagtttatatcgtttgtgataagcttcttggtgttatcacaataaatcgtaaagctttagggctaaaaaggactgtagtggtctcatggtccaacctcctgacttttcagatgagaatatatccctgtttattttttctttcgtttaagcatttccatctacatattatttcttttatatatttgaaagattctagtctgaagtaggtcaggtagggaggagaaaataaaagtgattcttgtttggcaaagactttcctagtggtaggcttggcagaatttcagactgcagtattgattcaaacacgtaaagtctatagcattcaacatttgaagtgccattatagcattgttttaattaactgcttgcttttataagctaattatatgtaagtgctggtgtcttcaatttaaatcctctgcagcatgacaaatcaatgacaatttttagttcttttgtcaggtcttaaacttatactcccatttggccgggcgcggtggctcacgcctgtaatcccagcactttgggaggccgaggcgggcggatcacgaggtcaggagatcgagaccatcctggctaacaaggtgaaaccccgtctctactaaaaatacaaaaaattagccgggcgtggtagcgggcgcctgtagtcccagctactggggaggctgaggcaggagaatggcgtgaacctgggaggcggagcttgcagtgagccgagatcgcgccactgcactccagcctgggcgacagagcgagacgctgtctcaaaaaaaaaaaaaaaaaaaaaaaaaaaaaacttatactcccatttgtagttgtagaagtggatatactcagtttgaaaatgactgattttctccaagttattttggtaaagaatgtcggacaaaagtttactgaagtgagtgctttagatgctgacttcaggtcagggagctctgcatttgaacccaaagaccacatctccagtatgtggttttcttactgtgtgtggttttgttttgtttttgtgacagggtcttgctctgttgcctaggctggagtgcagtggtacaatcacagcagccttgacctcccaggctcaggcgatcctctcacctcagcctcctgagtagctaggactacagtcacacgccaccacatcgggctaattttttttttttttttttttgagacggagtttcgttcttgttgcccaggctggagtgcaatggtgcagtctcggctcactgcaacctctgcctcccaggttcaagcgattatcctgcctcagcctcctgagtagctgggattacaggcatatgccaccacgcccggctagtttttgtatttttagtagagatggggtttcatcattttggtcaggctggtctcgaactcctgacctcaggtgatccacccaccttggcctcccaaagtgctgggattacaagtgtgagccaccgagcacatcgggctaatttttttgtattattttgtagagacagggtcataccatgttttccaggctggtctcgaactcctgggctcaagcaatccatctgccttggcctcccaaagtactgggattacaggtgtgagtcaccatacccgtcccttaatgtgtttttaagatactttagggcaactcttttttttttgtttttgagattatagaacctaagcattattgttcatagaattttaatacagaatgtgtttacttttaaaaaacacttctgactttttgaagacagtgactatatctgttttacgtttatttcttttattcttaagttaatcttttaaagaagcatccagcttcacactgtcattaatcaatacatataggtcaagggatgtacattttattcccataatatgtcactgttagtcaagaaattgttactaggtgactttcataactttgtcttgtcaaccagtaataactatgttctgtaggtcttcatattggtagttatattcttcattgtgtctctttttccatttttaatgaagaaactggtttaagagttactcttgaggttctcattaatgtatttctttttcgtacatctgcccatttcttgctgataatcacaagacacttctccttcactgacttcatatcaaaatgttttctactgtatgtgttatgactgaaagagaagtttgcttagatagtgcctgtcttctgggcaaatggtatgattagtttagtaatttaatccatcttgccaatatacatttctagattcccaggagaatataatgttcttgtaagagttttgtatcttgtttactaatgaaaagagagaatatggtgtatattcttggggcttcagaatgtctaatagaagcagcatcagaaggggatcacggtcctcgtatgaagaatttaaaaacttttggacttttaaatatttacagatttgctcttcatagtaatatttgaaatgattttaagttcattgcttagcatttgatattagcagatttttttggggggagaagcttctatcaaaataatgtgtaaattattttgtatgttggcagtttggacttaacatttttgttgaaggagaagaaaaatacctgttacatgtaaacactcgattgcattttttattgatttagtaatgaagttccttcagttaattgtaaatgaaaatttagtcactgtttacaaagaaaaaataatatcctagtgtatttcatgtataatttagtgtactttactcagatacattctttgagtgtagtaacatggtttctttatacattgcaggattataggccctataggtttagattctcatgaaccttttgagcaaatatggcagaaagctggtcacttttctcatgtctttaaattaagtggatggctcttcaagtgtctgtcttactcttagtctgaacatatacactcattcttattgcctcaaggaagtggtctctgagttgctttctgtagctccttgcctcttttaactattattggtatttacttggagagttgagtcttgttaggttaactgtcagtcattcccacctgtataacttgtaaatccatgcagcctttgctttctttctggctttatttaggctgaaatagatgtaacatttcttaaatgatcatataaggattttttttttcttgtgagcagaaactaatataagcattttatgcttttccaaagggttagcttaaaaaaaaaaggtcatttgtgatatttgagttcatatagcatcatatattaaatacatgtcatttattatgtttatattttaaatttgattatatatcttcagtttaaaaggtgaattttaaaaagtcaaatttaggcaactaataaaactagcagaagttgcttttcatttgtagtttttctcctagaatattgtatatatagtttgtgttttataaattattgttataaagatcatgtatcttccccaaatgcaaaaccgagttctgacaactatttaaaaataaaacaacaaatccaaacaaacaaaagtgcttggttaatctggaatgttagaaattgttttattctctgaagaaacaagaaaattgcattagaccgaggacttttgccataatttagctttataatagggattgacttaaatttactccttaggattctgtcttaccttctcttagcagattttataaaagaatatcacttgagtaacattttggaaaggctgggcagatttcataagctacccaacaaggcagttttatactagctaatgtgactacctgttgggctaatgaaactagtttaaaagttttatctttttctctccactgaacagatcattgtaaaatgattattgtaaaaatttagataacacagaaataggtaaaacagaaagcaaaagtccctgtagtccaactgctctggcttttattctttcagatttcattttctatatatactaggaggttaataatattttatttttaaaaattattggccagatatacatcctttccattttgggccatcactttacaacctctgtccaaattttcattcttttaaaaaatatgtagtgtttgacattatggatataccataatttattgccccattcttgatggacatttagatttttaatttttacttttgcaatcagtgctgtactgaactttatatacatccttgcatcttttgagtaattctgtagaagttcctacaaatagaattattagatcaagatgatatgcatgtttaaaaatttagcagatattaccaaatgcaccctcaaaagttttacattacacccccaccagctgtttatggaatgtctgtttacctatattctcaacacaatattatcaatcttaatcttcagtccaataggtaaaacattgttagaattggttataccgtgtcttaattattcagtgaagttaaatgtcagttactgtttgtttatatttgtgaattggctgttacagtgttggatcttgtgcaattaggttgggcttttcttatgattcataaggactttttgtatattacaaatactagttttggctgggtgcagtggctcacgcctgtaatcccagcactttgggaggccaaggtgggcagaccttttgagatcaggaattctagaccaccctgaccaacatggtgaaagcccatctttactaaaaatacaaaaaaattagctgggcatggtggtgtgcgcctgtagtcccagctacttgggaggctgaggcaggagaatgccttgaacccaggaggcagaggtttcagtgagccgagatcacaagactcaatctcaaaaaaacaaaaaacaaaaaaaaatagttttttttgtcatatgttttgcagattgccccccccccattttgatgttatttctgatatatcttggttatacagttttttcttttaatttttgtctttcttaaaggttccaaaagtctttcttcacttcaagattataaattatctacctatctttcctttagttctctgttttcatttttatattctaatatcatttaacccatcaggaatttcctttggtgtaaagaatgggtaggggatttggtttttaattttgttctttttagtttcctggttgtttcaacactatttactgagtaattaatgaatagtgaggggcagttgtaaacttgtttttgaagatcagcagaatcagccttcttggttggtggtttcctgggcagttctaccactcgagcaagacctgaagtgtttcccttcagaaaccacagcctgtgccatcttgctcactcactttccttccttccttccttccttccttccttccttccttccttccttccttccttatttgacagagttttgctctattacccatgctggagtgcagtggcgtcatcttgtctcacctcaacctctgcctcctgggttcaagctattcttgtgccttggcctccagagcagctgggactacaggcatgcaccaccacacctggctaatttttgtattttagtaaagacagggtttcaccatgttggctaggctggtcttgaactcctgacctcaagtgatccgcccaccttggcctcccaaagtgctgggattacaggcctgagccactgcgcctggtcttgcccactcacttgaacctctactactttgtagtattaaacccagatccactgatttaagcaaggcttcaaaacaattttactgccacagcctatataaactatagatttatataatactctctgttccattttagttgatttttcccccaatgacagaaattgttcttttttctactcacaggactgttattgaattagaaatttgaatttacatgtggtggatgaacatcactcttgttacctgcttcatgtacttttttgagtgcttactacctgtgatgattattctgtttctgatctccagtacttagcaaaactggagtttttccgcaaagctgcagatgagggaatgatttaccttaacagcccttcaggattttaacctaggattaagtaggtttgcatgtttgtgattcctttcattcagggcccggcttctgaaggtaggatgcggggaagagctttaaggatctaaatttcctcccagcctgagcaacatagtgagatcccatctcaataaaaaataaaaaaattagccagatgtggtgacacgtacttgtagtcccagctactcgggaggctgaggtgagataatcatttgagcccaggagtttgaggctgcagtgagccatgattgcaccactgcactctaaccttggcaacaagagctagaccctgtctcaaaaaaaaaaaaaaaaaaaaaaggagtctaaacttcccgatactgtattccaaatgtcctatgttaaatgctgtgttatcattccccgccccttggaatgtagaaaccgttaattacaggataaaagtgaactgagaagcaaatacccttgtgttgtagggtagaggttcttcacccaatgtggaattggtctgtaacaaatactgaacaacacaaactgaaataatttacaatctgatatgaattactctttttcatttcttaactccaacacttgattagttgctttcattaaatacatctgtgtcaatatcttaatggggttttttcttccgtttttgtttctgcctctctcctgttggagcgactcatttcttttcaagtgtcgtcttcaatctcccttctcctattttgccttctcaacctgattatgaattcacttccattattgagcttctctttactttatccaaatttgctatttatctcattgcagtttttcttcagtacttactttgcataaaagtagcctgaacttaaattatatacacggtcattttcaccagaagggctagctaatttaaaacttgggcgtgttatcttttctttcctcaagtcctgcagaatatagggtagtttcagaaatcacccccagcttttctctagacttggtgacagctgatgctttcttctgactcttcctttcctggagtgccgaccttcctgcaccttcctcgctgttgtcacatggaaaggctacaggatgttagacaatgtcaacagtttactatgtctctggcatgaaataaatggaccaaccagtatctgagaatattttttacttggctaattgattgtatgttttcccctactatatggaagttggacttagcctttctcatgttaaagattattcagaggcaggacggccatggctgttgtctttgggatgtccactgtaaaatggggagtcatacctacctcacagggtagttgtgaaatttaaagaagctaactttggtaaagtctctagcacagtgcttggcacatagtagggtgtgttaatttctttcccttccctgcaggccattcacctgctcttccctctacgattttccataacacagtttttacttggaaccagccttctgccaagagtctcagtttggttgtgtactcctacaactactatttttggcttgacttccctctccagctcccagtggtccagccacacagtcgcctattgtaccagctggttgatgtaagtctatccatcctcagaggaacctggttacttaccagtaagctgtgtttctctgaaaatgtagcatccttggtaatgattctagtcccccccatcccctttttttttaaaccattgatgatgaatcatctctaacttccttgtgtgatcctcaagttggaactggaattagagaatctaatttgttgataaaggtctcctagtaagttcctgagtccaggacacatggctctgaccaggtgaaatgtggagacccatgaggtaaaaattcttttcactactctgagtgacatgagacttaattatgtaaactgtcaaggatgatacattttcaaagaaaaataagttgctggtaagtaactgggatttttgagtaatttttctgtaagtcaataaataagaatcccacgtttgttttcaccaacaaatgcttttgcatttgaatatttcataaatgaaaggaatatggttgttagttacggttaatagtaaagaatgggataggtttctagatactagaaatacagtgaggtgggggtagaccatcagttttctaaataggtgctctcttagcttgaaacagaaattgaagtctccattagagaaaatcatcaagtgtagtctgttcattccagaaacattttttgagtgcctactgtttttttgagacactgtgctgagtatcgtttcaagacagaggtgaagccacacttggctcagctgcttttgccctcagagagcttatttcttgtctcttagtgactctcgcatgactcagaactgaggcgatgggatactggggtatgacagaggtatgggactggaagtagtacgtagtgctgcagcctgtgccttaatattttctgtgcttccataagttctttctgttaatgggaaaaatcagctgacttcattcagaatttgcagagtatttgctgtatcactagagcaaccatagatgaagcaaagccaatgctccttctttgtcatagttgaaaactcattctctaacccttatgtgcgactttggagttaggtgttaaagcaggtgaataagtcagtcggagaggcagcccactccccattaagctttcaaagcacttcttccttcagaagccacagaattaatttattcctgccaaatgttaaaaaaatcggaattttttttttttaagaaatgaaaattgttttgtactttaagtcactggatagtatttgatactatcagtatcagtaattatattcagtatattcggtaattataagcacctccacccccaaatttacccagttaagtagaaagaaggaaagaagacttggtagtattaataagttgttgttggaggagatgctcctattacattatgtctctattttctttttttttttttttttgaggcggggtctcccgtcgtcacccaggctggagtgcagtggtgctgatcacaacttactgcagcctttgcctcccaggctcaagtgatcctcccacctcagcccctcaagtagctgggactacaggcacgtgctaccttgctgggctaattttttgtgtgtttttagtagagacagggtttccccatgttgcccaggctggtcttgaacttctgggctcaagcgatctgcccgtcttggcctgccaaagtgctgagattatacgcttgagccactgtgcccagccatgtctctgttttatatagtaaatactgcatggctgtaattgttattttaccccatgagcattgcaagggcaagaactacagtgcagtaattaattaagctcacgggtgttgcagtcagactttaaatccaggttttaatcctggttttgtaatttgctacctttctgactagacaaattgtataacttctctgaacctcagtgtcctcatttgtgaagttttgatgctaaaactacaccataaggttgtaatgaggaataattaagataatatatacaagcacttagcacagtgcctgcaacatagtacgtgctcaataaatgttaactgctgtttttattggattattggatggatggatgaaggattgtatcagaggccaaatagcaggaaggggaaagattgtgggctctggagtgttagtaaactgttcacaccttcttgtttactcgagttaagagccttattagtattattacctttatctttgcctttttggaaagcaaattaatagatgaatcactgtcacagttcttcctaactactccatccttaaacctttacttccactaaggaaggaattatttttgtgctgcagtgactgtgatgattgagagattatcccactggcctgatgcaacccaatgctgagggtcaggtgtggcccatatgccagatttctactctgaatttcaccacaactagttctgctatttttaagacattttaaataaaaaatttaaacatttaatatgtgtgtgtgtgtgtgtgtgtgtgtgtgtgtatatatatatatataatgatttttcagtttcattttactacacttcttttttgctctattttcattgattgtggattatgaatgtatgtctaggatatttttgagaaggctctggaggacttacacctgggcagtagtactctttaaggaatctcggattcgtagacagggtggaaagtgctgtggttatttaggcacagagttataccatatttcagagaatcaaagatgcaaaatttttcacattttaacattggaaacaacatgcatcttagaatcactgtgataagaatggattatacctttgtttagttggcagcattttttcttagtgatacagaagataatgatgtaccttgaaatcgctgtcatcatagattgtatgaaatatggtgtttcaagggactatgtgcactgacacattttagcaatatggtatcatggcaatataaggagcgggaagagcaggggctccagagtcaggcttttggagtttacattctagcccgagaaccatgcgcaactttgggcaagctacttatcctttcttttctatagttttctcacctgtaaaatgggggctaagagtagtacccatcttacagtgttgtaatgaggattaaatagaagacatgtaatgtgtttaaaatagcctagcacatagaaagtacttagtaatcagctaatattattaattcagagattacagttttgcagaatagacttaaatttactttgttgtgattgaaacacaaacccattacccttaatatttatgtatcatctgataatatcagcaattgacacttagattttaaaaaaggaagataaggaagattaactgaacaagttttcttattctttttattttattttattttattttttttttttttgagacggagtttcgctctgtcgcccaggctggagtgcagtggcgcgatctcgactcactgcaagctccgcctcccgggttcacgccattctcctgcctcagcctcccgtgtagctgggactacaggcgcgcgccaccatgcctggctaatttttgtatttttagtagagacggggtttcaccgtgttagccaggatggtctcgatctcctgacctcgtgatccgcccgtctcggcctcccaaagtgctgggattacaggcgtgagccaccgcgcccggcccaagttttcttattcttattaagtaagatttaagtggcttatttggtatacatattactattctgtgtggttggaatgtaagagaaatgaaggatgagctaggaaataaatgtataggaaaagcatggaggagttaatcagatcgctgaatctcatataagtacagtttttgattcttactgatattggtaagtatgggaagggttggaggttttgaaaatttggaaaatttgaagcatttttgcaccctaagtaaaagaaaagagagaatcctatttggtttatatgaccactttactgtcctaggtaaggacttttttttcaaaattaaatatttgggtaggcagcatctctttacaatatgatggctacagcttaaggttgtccttttattcttaagagtcaattttattttttctgttttagtgttcggtgaccagtgacttggattttccaacacaagtcatcccattaaagactctgaatgcagttgcttcagtacccataatgtattcttggtctcccctacagcagaattttatggtatgtaaataagatatcttctgcttatttgataataacttatttgaagtaaaaaagcatagataattttattgtcaaggtgaatcaagacagtataaattctaaaaagctatcaaaataacacttgaagtaatttttaaaaattgattaaggtagtttttttaaggcctgtgcagtattactcttttcctatactctccaaaggaaaagtgttaagcagtaaccatacctaggattaaaaatatttaaaagatgggctgggcattgtggctcatgcctgtaatcccagcactttgggaggctgaggcagatggattacttgagtctgggaattggagatccacctgggcaatatggcaaaacgctgtgtcctcaaaacaaaagttagctgggtgtggcgcatgtctgtagtcccaagctactcaggaggctgaggtggaaggatggcttgagggaggcggaggttgtagtgagctgagattgtgccattgtactctagcttgggtgacagccagaccctgtctgaaaaaaacaaaaggaatgaagcttatagttcttatccttaaaaaagtcagtgtcctgtaatctaagtctgactttgagtttttgttaattgagaacttattatttaaaacaactttaggtagcattttattgtgataatgtacattatggtgtaaaattcatagggcttgtgaaacatgagctgaaacatagttccattgctaactctgacgcagcagcttttgtaataaaatgctaaagagaaactgaagcatgtgttcttgacttgtattgctaaataaaaaatatatagttgtattacttaattgatatataaagtgggaaggctaataaaatgttgatagaagtccttggtgaacctgctttggggaagtttttagtaacttttatactttgtacagtagagtctcaacttcagttactcttctgtagttgtataaatttgagtgtagtttgagaattacattgcatgaccttgagggaagtttcatgttttcacagactgaaattctggaagaatatattatttaaatttgtcattaatttatgaatcacccatggattttgctggtctagcctgggtgacagagccagaccctgtctgattttgctgaccaaagcagattaggcacacaatctttattgtaactaagatacgttttggagagcaggatgatgtggatatgattgaaaagacaaaatatctaagtgtcacttgattttggcttagatagaaagaaatcaacccctagtttaaatgagattagtgcaagtgaaatgagatgaaaacaggcctctagtgtgtacataagcttgaatttgaatatatgaatacattaaaacctgcattttaattatatgctccttttatcccactttttcttttccttgtctgtctacggtacttgttatctttatgaactctccagttgtcctaaatttgttacctagggattatttgagattttttccacattccctggctgctactagtcctgtgtgtggcctttcccagcgtgttcttacctgtgggccatgatcatagtgctgggccgagcctacgccatctcaccctttaaagagcttctgtgtcctcccagtcaggcatagccagtccattctgcttattataattatctttctaaaattctgttttcaaccaatactcttttcaaaggcctcttaagacttagacttgtcttcacttggaattagtctctttaaacatgtacttcagaactgtccagtctttatctataactgctgtcatttttattcttcattgaaaatgctcttcctcctatgaatgtcaactttctttaccttgtatgcttaactattctattctgtcttaacttttgtttgattggctattcttctttcttctctgttgtcttccaaagcttgataaaaactcatctatcatctttactagcactgtcaactttgatattcatctcattcatctaaatattgaaatattttatgtttttgtagaatgttcttattttacatataagtacatatccttttggcataaactttaatggactatcaatactctgtatccctagaattttattatattggatgtcttacatttttttttcattttaccttaaactattacaagttaatggctgttttaataactggatcatcaagtggagtttgggagtcttagggtagttttttggtatgggtctttatagttgatcttgatacaccatatttcatcatcctctattaacatctaaagtgcgcgttaaaactgatgatggctgggcatggtggctcatggtgtcagacacctgttatcccagcactttgggagccaaggcgggtggatcacttgagctcaggagttcgagaccagcctgggcagcatagtgagacactcgtctcaattaaaaaacaaaaacagaaaaacagacgatgtcttctcataatctagagcatctttttctttcttagaggtatgtacaataatggtggtaagttttaatgattgatgacagactaagtgcattattttttctagaattaaattttttttctgtcaacagttttctcagatatgcttattggtgagaggggtcttttattttttgataaattttagagtttgctctctgactagtattttaaatctggagaactgggtaaagacatgtacacatgaaaaaaaggttgtattttagttatttcacatttgatacttagagtaaacctgctttttaaatatatttttttcttttaggtggaagatgaaactgttttacataacattccttatatgggagatgaagttttagatcaggatggtactttcattgaagaactaataaaaaattatgatgggaaagtacacggggatagaggtgagccatatgcttcttctcttggaaaaaggggctaaagaattgagagacacttttgtttatgaagcatatagggcatgagaaaaattttaatattaaaattaagttttgcactgaactataagggactgaacctgggcccaggcctaagattttcagtattttccctaactatttttgggaaaattagttaggaggatcatgtttgccacctgataattatgcatagttggttataacataatggcaataacatgtaaattaaatagaacttgagtgtatgtagattttaagattctttagtagtaaaattaattaggattggggctctgcttctgtggcatataggggctccaacagcccctactactaaaaaataccgctcctctagggactacagtacctgaaattcaatccttagagtcatggtttcagttttttgtgtccaggaggccctgttaaagtgtctgaaaggataatatttgtaatatcatcatccattgtcattatcagcagaaagcagggtctgaaatgatcagttaaaggacagatccattgtttgggaggaggccaaagccacaatcagttcctagaagattcagttttctactagaaagttttggggaggggccattctacagaaagtagcaggtattaaagataagtttgcttcctttgcctaacaccagtcctgaaaatgatcttatcttttcctcccctcatttcaataataatgttttagtgccagttactaggctatgcctgttttgtccaagtagaaaaaggatacataaacttttgacattattgcttctcctgtgtgtttctgacatttgatgcgtttcagaatgtgggtttataaatgatgaaatttttgtggagttggtgaatgcccttggtcaatataatgatgatgacgatgatgatgatggagacgatcctgaagaaagagaagaaaagcagaaagatctggaggatcaccgagatggtatgcctgattattaggattctgtgtagccattacagctttctttcaaaaacagtagaaagagtagaaatagggcttagtttcttctttctctttttctttctttgttaaatatcacattgatagcagtataatcaaaattaacatattatggccaggtagggtggctaactctgtaatcctagcacttgggaggctaaggtgggcagattgcttgagcccaggagttcaagaccaacctgggcaacatagtgagaccccatctctactaaaaagtaaaaaaatgagacagggtgattgcttgagcccaggaggtgtaggctgcattgagctgtgattgtgccactgcacagtctggctgggtgacagagtgagaccttgccttaaaaaagaaaaaaaaaagcataatacttgcaacattatcttcacttgagtatctttgtttcctttggctagcaaagaacgtaattttttgtgtgcttcactgggcatcattataatatataacattgatattcaccgtgtacaagttgtgtactaatcacttcttatgcaccagctcacttaatcctcataatggcttcatgagatggatgttattatcagatccattttctttttcgagacggagtctcgctctgtcgcccaggctagagtacagtggccccatctcagcttactgcaagcttcgcctcctgggttcacgccattctcctgcctcagcctcccgagtagctgggactataggcacctgccaccacacccagctaattttttgtattttttagtagagacggggtttcaccgtgttagccaggatggtctctatctcctgacctcgtgatccacctgcctcggcctcccaaagtgctaggattacaggcgtgagccactgcgccccacctgtcagatccattttctatttgaggggatagatttagagaggttaagtaacttataagattacactattgggaagaaacagagtcaatagttggtgttctctacttggcaaagctcatgctaaggcagcatagaatagaataatttggcgggtgaaatagcaatttctaagaagcgtatttcaaaaaagagaaaataacaaaaaggtaccttattgaccttattgatcatctagttcagctccttcattttacagatgagtaaacagacccaagaggtaaagtgatcactctaagtcacaaaatcagttagtagcagagctgggagtagaacctaggttttctgcttcccagtgctcttaaagcttttcatatttgaatttgaattttgtttttgactgactggcattccacagacatgtaaagtatgtgagaagtaagtaaaacacaaaatagagatgatttcttagaaaatcagctttgttatagagacataattgggtagagaaaatgaaagatcaaaaacttgtttacttccattctttttttcctttcatattctcctgtttagataaagaaagccgcccacctcggaaatttccttctgataaaatttttgaagccatttcctcaatgtttccagataagggcacagcagaagaactaaaggaaaagtaagaatttgttcctttgaggcaatcttgccctgtatggtatgtaactcaccattttggtttattacaaatggaatcaatgtagcggatgagccactacactttgtttacagtgtttgcaagatacttgaagcaacatgtgtacttgtggtactctgcattacaaaatatttcctgtagatagaataaatacatatgtataatttatatatacacataaacacacacatatacataaaatttacagtagtacatttacaggaaaattatctggatactggtagaaatttgatgtttagttaaaactaatataatatccttttccatgatatatttgaatcatatcgatgaatttgattcttgataacaccatgcacaatatttagttggctctttatctaaatagagccattcctttatgttttaggcaagataaacatcaaaagtaacacatggaaaccttttagaaactgttttcaaaaaagtgatttttgtttcatgtttacttaaatttttcttggttaatgtcagatataaagaactcaccgaacagcagctcccaggcgcacttcctcctgaatgtacccccaacatagatggaccaaatgctaaatctgttcagagagagcaaagcttacactcctttcatacgcttttctgtaggcgatgttttaaatatgactgcttcctacatcgtaagtgcaattattgtacgttttcattttctatctttgttgtggaattatgttttaaagcagcttggagagtgctatcatttattacaactagaatttatcatttaatcttgtagttactttgacaaatatctttagatctcagtattattatttttactttgttgcttgaggattgctctgaaatcttttgcatgtatttcatttggactactattttccactaacatggaattcaggtcagtgatttttttttttttcccccgtaagtgctaactaagcagttgttttacaataaaactattattatgaactggtagcccagagcaacattgctgatattgatgaataaattgtgttaaataagaaattggccaaaaaaatgttcaggtaagtgcttgtcgatttaatgtaattttattttattttattttatttttttgccctctgggtaagttgttttttaaaaatacctgcatttgaatacaagtaaaacgtaaaatgttcttagtgaaaatgtaagtatggtatatacaaaaatacttttttcctctggcatttctagggaatgtggtttcttagtaaattttcctggtaattgaaacttctaagcacagtttaaaagcgtcaactacttttgaggcacatattttgaaaatgtatttaatacttcctaattttcctagagtagtttgcttattatagtttggtttttcctatattgtattttagtacgtctgtctatggcatggtaatttctttaggggctttgacccattgtaaaatcgttttcccctgtactcaacggccccacattgctttgttgttttgagttcctgtgcctaccattgacagatttattcctcctcgttcaccaatgataacgtctttttaagcttgcccaagcagctgtacctcacctcctcctaagtgtttgctctacttgtttttgctgcagctaataatgtgttgagtgatgtaatacattggtctggaaatgttaagttttgtttttgtgtgtgacatattagtggtttagttatcttaaaatagaaaaacttgaagtagatttttagaattatcattatattgttacctccttgctcttgttctaactcctcatctagtttaaattgatttggtagttttaaaaattcgtagtaagtcatccatttgttgcttcagccattggacagttaagcccttgaaatagttgtcttgaatttcattttaatttccctttacacaccatgaatttatgaattacatcgagtttttattaagactattggacattgtatgtagatatcactatagcaaaagaattgagtggaagcactattttggagtcgctgaaaggtccttccaatttgttgtttatagatgtagcatttaataaagtttttttgctgtaaaaatgaaccatagaagtaggacactacttttaaacattacaagttttttattgtgccattcagagatgagtaatttttttttttgttaacttgaatcttgaacctgttacttacctcattctagctggggagaacagtggaatattttactttaataaagttggctttcatggggctaattggctgcctccttgtagcatttggtggccatgggtccaactgtgctaggcccacttttacttctttttacagtagagccagtgtcttcatcattcagtcctattgagttctgtaggaacttcattgttttacgttaacttcgacaaaataccacacatggtatatttttcttaggtaaaataagttactaaataaatcattaaatatatataatcatgcattacttatggacggagatgcattctgagaaatgtgttgttaggtgattttggcattatgtaaacacagagtgtacttacacaaacctagatggtacagcgcatgacacacctaggccacatatccctgcagcatgccactgtactggatactggaggcagttgtgacacattggcaagtatttgtatgtttaaatcataataaacatagaaaatatacagtaaaaatacaatattatcttatggtaccactgttgtatatgcggtccatcattgactcagatggtatgcagcacatgactgtttcttttttgttgttgttgttgtttttttttttttttgagacgaagtctcgttctgttgctcagtctgaagtgcagtggtgtgatttcagctcgctgcaacctccgcctgctggattcaaaggattctcctgtctcagcctcctgagtagctgggattacaggcgcccgccaccacgtccagctaatttttgtatttttagtagagatggggtttcaccatgttggccaggctggtcttgaactcctgacctcaagtgatccacctgccctggcctcccaaagtgttgggactacaggtgtgagctaccacgcctggtcgattttatgttgaatatagcattttgtgctttagttttctggtctcttatcttggggatacggtagtacttcctttacagagctgttgtgaggattagatgaattaatgtggggaagatacttaaaatggtacctggctcttgttagctattgttgtttttaaaataggtcatcattcacatggtttacgtttccaaaaagtattaatatgaagatgtgctgggcgcggtggctcatccttttaatgccagtgctttgggaggcagaggtgggaggactgcttgagcccaaaagtttgaggctgcagtgagctatgatcatgccactgtactccagctgggtgacagagtgagaccccatctcttaaaaaaaaaaaaaaagtatgaaaatgtgtacaataaagtctcccaatgactttctgttccccatccttcgaaattttacctcactcttccacttttattagtagttaaccacttttattggttctcgtattttttttacagtttctttgacaagtataaagatacccttttttctgaccgtcttatttacatggtggcatagcattcaggcttttccctttttttggaataaggataggatttaatattgtagctattagctttatctgtatagctgcatagcctgtgctgtaggaggttccagaacttactggactggtctctaatggtgaccatttggattattttgagccttatgctgtaacgatgccacagcaaatatctgtacccatttcatgcaagtttaagtttacctgataaactctatttaggtattgccaaatgacctgccatatggggatgcagcactttaaagccctaccagcaaagtcagagagccctgcccatagaaggtgttaccaaactaatttttaaaattgattttataagtgaaaaatggcttttagcattatttttaaattcttgtttttctttgttttttaatctctgcttcccacaggtgataagcattgttttaatatctggatttaattcctttgaatgagggtaggatcttcctatatgttgaagagtgaactatttttattctttgtttttttgattttgtgagacgggtctcgctctgtcgcccaggctggagtgcagtggtgcagtcttggctcacggcgacctctgcctcctggattcaagtgattctcctgcctcagccttctgagtagctgggattacaggcgcgcaccacctcacctggctcatatttttatttttagtagaaacagggtttcaccatgttggccaggctggtctcaaactcctgaccttaggtaatccacccacctcagcctctcacagtgctaggattactggtgtgagccactgcgcctggcctatttttattcttggtctcatagatctttttgatgtcttaggagctttttatataatcaggaaattaggttttttgaaatatgagttgcaatttttttcaagtttatttggtaaaagtcccataagcaaagtttaaacttttttttttttttgagacagtcttgctctgtcgctcaggctggagtgcaatggtgtgatcttggctcattgcagcctttgcctcctgggttcaagggattcttgtgcctcagcctctggagtagctgggactacaggcatgtgctaccacatccagctaatttttctatttttagtagagatgtggttttgccatgttggccaggccggtctcaaactcctgacctcaagtgatctgcccgcctcagcctctgaaagtgctgagattacaggtgtgagccactgcacctggtcagtttaaacattttttaaaaagtagttgaatttatcagttagctttcccattccaagattataaagcgtttctcactttttctagtatgttttaggcttcatttttaaaaacataaatctttgatccatttggaatttaatatgatgtggattataaatctgatcctcctcctcacttccaaagttgcctagttgtttcatttactgaaaagttcatctttcactaccttgagatatttccttcattgcctgttgccatatgtatttgggtttctcaacattgtgttcctttagtctattcatgaggcggtattcagagatctcctggcaattcttgtttttctatataaatttatttatttagagagagagatatatatacatacacacatacatacatacacagggtcttgctctgtcacccaggccagagtggtgcagtggcacaatcatggctcactgcaaccttgacttcctgagctcaagctcttctcctatctcagcttcctgcgtagctgggactacaagcatgcaccaccattgctggttagttttctttttctttttttgagatagggtctcactatgttgcccaggctggtcttaaactcctggcctcaagtgatgctcctactttgggctcccaaagtgctggaattacaggcgtgagccactgcacccagcctatatacatttcaaaatctgtttgtctagttctttttaaaaaaaattagtggtatgtttattggaatcccattaaatttataaattacctaatttctttttaaaatataagggttaagtctaactaaccataccatcacctctctttttgtgtcctttaattatctcccaagttttctttatgtgactcttgtacattttttgttgagtatttctaggtattaaacttgctgctgctgttgggctttttccacattttgtcttctgttttgtaccctgctaccttactgcattgtcttcatgttttatcagtttctcagtacattcttaggagttttccagctgtgtaattatactgtctgtagttattaatggttttaccttctatccagtctttataactgaagcttctttctcttttctacctactttatttatttattttttggttgggcgggggaggggagtggggaggctttctgataaaaaccagaaagcctgctagacaaattctaaaagagctgtaactgtcttttctacctactttagcttgtagtttcagtacagtttaaaaattagtagtgctggtagatagagataaatgttctgtctcttctggatgagttttagaaaattattctttacatccaggttttgagatttatttgtatgaagtttatgtgttctctaatgttcgttttatttttgttaatattcttgttctctatatatttcattgtcacttttttgttaagaagtggtttttgtattttaaattatgtatttttttcttcagagaaccagctacaatgttagtttaactcataaacagaaaaacagttgtattagggttccttaacaaacgtaatccagcaccagattagtattggtgttaggctgtctggagcctaattgctcacacgcttccaacagaatctgagccttgaatttttcttctttaaaaacacaactttgtccttttttttttttttccttccttttctcagtctttaaatatggctttttacaaatatttaaaagatgatttgttttgtggaaatgtcacttgtttttctccaaattaattttcatcttgtataattctgaatagtccatttccagcatttcccttttgtatatgaggaagtaagtttttgcaagaaattctgtgaagttagcactgctgtcaatgttcacactcttttcatgtagcagtgtacccgcatttgaatctttctgttacattattttggaattttaggtttcaaacagtgtatctttctaaaatccgtttttttgacattgtaattttctgtggcaagacactataagctctcaccaggttcttggattgggtatgattcacaggaattgaatgttagtaatctggggctgtcctctttatcattaaaaatgagtttttacaactggtgacaagctgattgctgacctttctttagaaatcaagaaattgtatgtcagaattaaaaataggaaatctgatttaattgtagagggtctatcaactgcttagacagagatagtaagattcaatttaagtaaatgtttataaccatagttatgcgcatcagttttacttgcaaggagaaaaatgagaaatcacgactcattccagaatttactgtttttccttcctgcttaatggttggaggaggaggaatggagaatacgttgtgatcattcagtaagagcctgaaggaaagttgtatgaagtaacgtaaaccacatattagcaagattataatccattaattgacttttccagtggaactggaagagtgaaaaagtaagtattttatagttatattagattctttgtttcatttattttgcagcttttcatgcaacacccaacacttataagcggaagaacacagaaacagctctagacaacaaaccttgtggaccacagtgttaccagcatttggtaagacttagtgcctaattattgcagagggtacttgagaggactttgcactttggtggaggtgatcaagtcagcgttaatgttgtctgcacccatgctgttatgggccatatgatagacagagctttctcacccatgctgtttcttccatagctcatgtactgcacattttagtccttcattaatgtggtattattctttttaaaatctgtgttatctcttcagcaacatttcaaggtctttaggatcaaggacttttatgccttccacaaagtctatgagagttgcaaggcacagatagtccgcttagaaagcaggcatgcagtaatcatacgcagtagatcccaagcccctctcatagccatatccctctacttgagttttagatgcactgtcatttcagctatgtgataggttccacagattttttttttttaaatgatggagaacaggtaaggggttaggaaaatatgaggtagaaaagttgtttttacgggtactctcttatttttaccatttcccctctttgaaccaagccactcctacctaggaactaaatgggtatatattgcctgttggattttggacagaagattcattgaatggcacctgcagaaggtatcctatttttaagcaatttggtttttgtagaatgaagtataaaactgttggctgctgtcaaacttctcccttctatttccactaaaaaaatggaattcttgagcacttgttttataatattctttacaaggcagaattttgtttggctcatctaaaatgtttctgtggtctctataaaccatgctcttaccattgttttatactttgagactggattattgtacttcataatgcaagatgtaaccctcacagtcttattcctgaagttcctttcatgtcttcctgtggctgtgtatccttcacaggaaaaaaaaaaatgttggatgttttaatagtaagacaggaagtgacaaagtcaagcatgtttgtgttttgtgttcttgtatagttgaaatattaacacgaagaggtatgcattatcttaaactctgcataggtagtctgactccgtgcacattaggtatatgattcttttgtaaagattcacttttaaatagactgtatgtccatagagataattacctttattacatgaagtatatttcatactttatcttcttatattttaacttaattataactagctaatatattttacaaattcacaatatagaactgtcttgcctgatttttgtaccattctaggaatatatagaacccatatttctctttctgaaattttcagactatcaaaagcatatcaaaacaagtatattagacatgcaaatgattatttgtgataaatggataatgtgatacattttttgactaacctggcttatatagtatttttttttctcttccatcaaaatgagttttagaactttgccctgatgttgacatttttcatttcgtaggagggagcaaaggagtttgctgctgctctcaccgctgagcggataaagaccccaccaaaacgtccaggaggccgcagaagaggacggcttcccaataacagtagcaggcccagcacccccaccattaatgtgctggaatcaaaggatacagacagtgatagggaagcagggactgaaacggggggagagaacaatgataaagaagaagaagagaagaaagatgaaacttcgagctcctctggtaagacacgtctaataactgggttttactgttctgtgaaagttcgtgttgtgaggattaaggatgtataatgcattgaataattttcttagttggttagtttcagtataaagaccagagttatctcaagaatgtgtagctgtgttgtttctgtttcctgcctgcacccgtaccctagcttgtggtgtttgccctgcttggttgtttgaaagctgatgatgcactttattctcattctttgtgccattttcttttttcgatctttctcaggtagggaataatgaaatttggatcatttggtttaatattcttgacgttctgtgagtagttttgttggaaaatgtgaactacgatgggttagtgttttgccgattggatttgagttgtcctcatcttttcgcttttttcttaagcacaccctgaattgtacttcttaatattatttccaatcatttcttgaccagtgcttacatttggttttgtagaagcaaattctcggtgtcaaacaccaataaagatgaagccaaatattgaacctcctgagaatgtggagtggagtggtgctgaagcctcaatgtttagagtcctcattggcacttactatgacaatttctgtgccattgctaggttaattgggaccaaaacatgtagacaggtaagatatccgataaaaatgttgttaaaagagcttcaaacatagagataaaactgtactcgttgtccaaacaaagaaaattcttggttattactaagctcctattcatctcctaaaaataatttttttttcttcccaagagggaattgaatgaaaattattctccaggtatgttacagaatttccccaatgtagacttttaaggttagatagcagtagcttttaaaagctagtaagaattgaaatttagcatcacagttcttgaccagaatataattacagctacccctaatgtgagggtagggacagcgatgtgtgttatatccccagcatctagcagtgtcacagaagagacaaagacatttttctggtatgcatgagtataagaatggtttgcctaaataagactgtcctcatggctctgtgactgtgcctcttgtcaggtgtatgagtttagagtcaaagaatctagcatcatagctccagctcccgctgaggatgtggatactcctccaaggaaaaagaagaggaaacaccggtgagtctgtcatgaagctccttagagaagtcaacatagatagacactgcaggcaaggcccttcctaagggctgttgttggtttctacttagtctatttttaaaaaaccttaaactgccatcaaaaacagaactatggaatcttatttccactgggaattgctagtatttttctataagaatacagcagccttcagtatatttggtatgttaagagtcataaaaattacggttaccagactgcatttgggttaagaaaaacatatttagtagcttttgcagtaaaggttacgtaaacaattactttaacatcatgaaatgttctgtgtttctgatgtgagctctgggccagtttttagaagtatcttttattccaggagcttgaatttctaagttgtgtggcattgcattccgatactcctaatgggtaccctactttaagcttgtgtgaatgttattttcaccttagcgaatgttttcaggctgatttgatttgtaaatgtagaaccagaaaaattgatgagtggactatctgctctaatctccccatacctctacctcacatttttaaaaatgagaaacctaattgggtaggtaagggtgcagttagattatgcttcttaaattgtgtacaggctcatgttacattttcttactttaacaaaaataagtgtagggccaacccaatttagaatttttttaaagtcaagtttttatttttattttttaggctttaggagatgcttctgaaattttggttgaattatttctgaccacgtagttcacttgcttggtttatgatgcctgaaataagaggaagtgatcagtgtcatccacatcagaataaatcaacaggcagacacacctgctgctttgtgcagcattgggagctcaggagttctgaccaggagtcatggatgaacacaggaaatgacgtcttgccacacctggggcagcctgagccatcaagctgtttgagttgcttcaaactgatggcaaatataaactgggcagggcatgactcttggctttaacgcattcctgtattcatggcacagatagatccagttaagcagctctctgttggatttgtagcttcccgcagaaatttggtttaattttctttgtgtttttgcaggttgtgggctgcacactgcagaaagatacagctgaaaaagggttagcatctttccattcctctcattattagcttaacaatatctgctttgttttcatttgttttagaatagtaactggattagagcttgggttattctaatataattgccttctgtatgttaaaccaatttgaatggaggacgtctactgatgaatccccagtcaattctcttctgtaaagtggaggctgactggaaggtgtgagtccgagtcagttgaaggagaagtgctttgggatgggactgagatgtagccgtgctttagatggaactcataagcacttgggggtgggagagtattttttgccatcgttgtggaaaccggaatatgtgtaatgttatgcattcagtaaaggcaggccagctacactccacaggtagtagggaagaatgtactcgtgttaattgtgtatgatcgtttccatctccctggattcattggcctgcatgatgttatctttactcagacggctcctctaaccatgtttacaactatcaaccctgtgatcatccacggcagccttgtgacagttcgtgcccttgtgtgatagcacaaaatttttgtgaaaagttttgtcaatgtagttcagagtgtaagtatttgttgctttgatgcaattgcatgagaactaaataggtctttggttagcaatttaaaaaatcaaaaataagaacatgggagcactcccttgtttacttgacgaaactcatcaatttgacaagtatttattgagccccatacctggccctgtgccagtggccagtcagtcgcctgggtgttgtgtgtctgtgtgtgtgaggcaggcaaagttgtattaaaggaacctgaattttatttttttcttctttgatcatttaaattaagttgtattaaagttggcacagattgtaagaggaatctagaaggagctacccaaataatttttgggcaccagaaatcgtcagagttaggagggttttagtcttcagattaaaggaatgtagcataaacatagtagatttttataattgtttaatgagactgcacatgaagcttgggtattaagggagtgtttagaactaggggctattggaatggtcaaggaccatggatattgttccatccagaccctttattcacaccgactttaaatatatacactatttaacaaatgaaaaatggaaaaacaactcagtggtggtctttttcagtgcaaacagctataacttcgctgttaatacttccatttccttgtctatatagtagggtaataaggtggttgtgagggttgagagtcagtgagatgcccagtacagcccttgccacgtatctttctgcaagtttttgcatacggtgatgagtgaagaacctccaaacctctctctgaaggtcaaaaccgctttccgggatgccgctgcaaagcacagtgcaacaccaagcagtgcccgtgctacctggctgtccgagagtgtgaccctgacctctgtcttacttgtggagccgctgaccattgggacagtaaaaatgtgtcctgcaagaactgcagtattcagcggggctccaaaaaggtgagcaacaagtcacttctggaagattgtttgtagttagctatttagtgatgcaaatgtcaggattgccttagatgatttagctggggcaaaaagtaaaagtgatccttgaaaggtgcaactgatgagaaagtgttcataattttctctgggtaatgcacccttgggcagtctcttcagttttatatagagcaccatactctgatagtaggagaaaccagcaaattctgagaagtagccattcatggtatcagatttaggaataagaggtattttttctacctgtttaatagattatttgaatttgtcttttagttaatagtttatctagtatccttaatgcaaataaatggtgatttctatcaaaatatagactcattctcatcaaagagtatttatagattccttgctatgtagagtaaaagatgaaatttcccatggcaggtttttatagacttacttcctgtttgtttaataaccttgaaaaaaacccagctaggaactatatatttttagtctggggaattgtatgtaggtgagttaactctatcagccaggaagtaatgattgagcaaaagacacttcagcagcatgtatttgggaaatttcgtatcttttttttttttttagggcagatgataagttctttcttcagtcagttctttttataataatagctgacatttattaagcatgtaaaaataggcactgttgtgagtgctttagtggatttgttcattgattctcctaaccctgtgagtgaggagtaagtgttaacccccattttacgggtaaggaaacccaaagtcacaagacttgtaaaggagcaggagatcaaatcctccaggctcccattaacctgctcttatgctctgtgtgtgtgtgtgtgtgtgtgtgtgtgtgtgtatgtggggtgtagagtagacatatctttgttgttggaccatttatttataattgagaacacacttcttaccagcaagtccccttctaccagaaattctgctccaggcaaaacattgaagttctcttggttttgtttgtgtctttgaaccaaagtctgtgtttatggcagagagttgtgcagggtggtgggctttttgtttttagctttgacttttttcttttctgttagacatttagatgattttactctaggcagttatatgtccatttaggtcattggatcacagtgactctggttccgtttccgatggcatacctgctcagacctaaaaatctcaatttcccccccaaacaacttaccattgtactccttcctcactttgttcagaaagtgggcaattctattcatactgacatgtcctctttgtaagacattttttaactcttaaaaatgttaaactatgtagataccttttaccagttgggtttcatttgcatagcagtatttagctaatttagtttctgatcagaaggctatttgggaagttcacatgacaggtgagtggtaagatggtccagaataggaatagataggaagcctttgtaaaggtcacaagaaaattttggatgaaagcataatactgagccgtgatgaaaaattggcatatgttggggaacacatccctaaatacataatttatagcaatgatcatcttggcatttctgctgaaaatagactactggactgacaagatcatgataacacctcccggtagtttcttgtgttatcctgaggaggtggggtggaagaacaaatccaaagccaagctgctatgggcttcagagggaaccaacgccagtgaagaatcagggggtgtcctggggctgaaaatggaataactattaatagaatcacttggggaaagtagagggaaaggtatggagaggaagagtgatttggtggtgtccttatattaaattcaggttgaaagtgaattactcgaggaaatcaagggctgaagatacagggaagccaaaagtgcagcaggcctagagcaccttgctgaacgatggtcattgcagaggaccaacaccaccaaaaggttttctgtaagacagagattcttatctgctgtataaggaaaacataatgttcatagccattctcagcagctttcacgttgactgaagctgtgtgcccaattactgccttagaacaaacaggtctgaggatttacagtgatagcttttgttttcattctgtagtctactttgtccccagtccattttcaccctccttttttgatgatgtgattgtgttttattctctagcatctattgctggcaccatctgacgtggcaggctgggggatttttatcaaagatcctgtgcagaaaaatgaattcatctcagaatactgtggagaggtaaggcactgataacctgtattcaggtggcattgtatatactaactttactttattttagattgattttattaggtaagtctgtgggtttgattggaaatgaattgccataaactgccttttcagcctggacttctgcatgtttgtggatttgcatgcttagtaactggattgtgctgggcgcggtggccgactcctgcaatcccagcactttgggaggccgaggcaggtggattgcttgagctcaggagttggagaccagcatgggcaacatggcaagaccccattgctacaaaaaatgcaaaaattagccgggcgtggtggtgcatacttgtagtcccagctacttgggagctgaggcaggaagatcgcttgagcctggaagagcctgggaggttgaggctgcagtgagccatgtttgtgccactgcactccggcctgggcgacaaagtgagaccctgtctcagaggggaaaaaaagcaaaacaaaacaggattgcttggttctagccacatttagtttttctcgtctagggacaacagggagaacaagagctttaccatagagtggcctgcttaatccacaacctagttgataaggacctagaaacaacaacgtcattagttattcaccttttaaattgtcgacagtgttaccgaaaaatcataggcctagcttcagtttggaaccagctcacccaaattttttttttttttttttttttttttgagacagagtttcgctcttgttgcccaggccggagtgcaatggcgtgattttggctcaccgcaacctcagcctcccgggttcaagcgattctcctgcctcagtgtcccgagtagctgggattacaggcatgcgccaccgcgcccaggtgatctgcccgcctcggcctcccaaagtgctgggattacaggcgtgagccactgcagccggcttttttaaaaaactcagcaaaaagactttggttcctcactttctccaaggataattacttcaggatgtggaaatatttctgagttggggtccttagtatacagttattctttattactgcgcagaccgaatgggaaagagaacttggctgtagtgaccctttttgttgcgttttctccagaaggtccagtattcactctgtgcgcttttgtgtgttctgtcaggcttgatcacctttatccaaaagaattttctcctgtgtctttctttttagattatttctcaagatgaagctgacagaagagggaaagtgtatgataaatacatgtgcagctttctgttcaacttgaacaatggtatgtttcagagctgggaggcagtgagttcctgagttgcatgtggcagccttctgccggccgagtgttcagaaacgagggtagaggtcagtgaggtgaccagaaggaggatctccttagaggcatggggggctgcttgcttgaaaggaactggagcaaggaattcctcagggagcagatagactagatgtgcaggaaaccgcctctctggagtcccggctgtctgtgggtggcactatcccagcatctggctgtgaaggggacgttgtgctcttgctgctcacctcacctcttgtgttcaggcagctcagcacacctcctccagtcagtgcctctgagcggggaaggaggggaggagcactgcatttgcaaccatcttccagactcccctggatattctcaaaggactgagaggaaaggcagctgctttcatagctgatgttctggggtagaatgtaaggctgtgtagggatgtttctggtgggattatgtgaaaatggaggtaggcttaacatgtaagatattcagagaaactcttagttggaacaagtagaataggtttttttctatgaatgctttatagacattataatgaaaaaaactaattttaaatgtgaaaatgcctattcgtgatgtttggaagaattttgtcagatttttttttttttttgctatgttttgctcagtaatgtatgtttatagttgataattaatagcttttgagtcagataaccatcttgaattataggtgattaattttaacctggaacaatagtgtgttcttccaaatgtcatttcttactgaatgaagctgcttgatttatttgcttttgcaggcaaaccctgaagaactgtaaccagttgcatttacaaaatcataataacttggtttacttataactgaaattattcactgggctgtgcttacttttttctttttagattttgtggtggatgcaacccgcaagggtaacaaaattcgttttgcaaatcattcggtaaatccaaactgctatgcaaaaggtaggtacctttgacgtgagaattggaactcccttttcagtcctgtgatgatggacttgaatacttctgggatagttgtttgttatgtgaacaagtcagttaaccccccgtggcccgtcttcatgctcactgacaccagtgtgtctctttgcagttatgatggttaacggtgatcacaggataggtatttttgccaagagagccatccagactggcgaagagctgttttttgattacaggttggtaaagtacatttctagcatgatctctaagggctttttctactggattgtgaactctggacaaaggagggtttttagttctttgcttcttttgatgggtcactttgccatgagcattagtggggaattaggttacactttcctgttatgtatttattatccatttatatattatacaaggcatgcttatttttaaaatagagtaaaatccatgcagaaagccccatttctcaccctgctgttgacagctgggtgagtcctagaccttctcatatcatgccgcatgctgcatgctcactcgtggagcgttttccagataagtgcgatcacactgtcctatagatttttctgcaacatggttttacttgacaatatactatgcatatctttatggattagatctacttaatttattgtttgctataatacttattacacatatcattaccattttaaaaggggctgttggcaaatcgctgtctgatcaccctgtggggatgcctgggacacgtgggccaccaatggtatctgtgtggttaggcattaggctgccagttgacactgtcaagctctgtgggatacatttaagtcagccattgaatacagatttaagtgcagtcagatgactgtctagttaatgaactcctgtagccccgtgtacatcccatccagaagctgtctttgagtactgtgttcttgcatattcaggctggcctttaatggctgttgcacagcagcgagctctcagtgaggcagacagggtctgagtgaagggcccactttagcaaaggccgctgccttcactccaggctggctctgaatgaagagtgtggggtggagcttccttgggatgacccggtggcctcaccccccatggtgggcttcttgtgctcctctctgggtgtccgctgcactccagttcttgcttcacctgggggagcaactggcgggctgctctttggccctctttgctatggtcatcattttttccagaccatggttctattttgccttcccagcgtcaggcctaagcatcctgatgtggaccagccttcctgggaccacttgcttcagaggcataggggaggctggtcaggctctgggaatgcttgtagacaggtttgttcacttcagaacttggcagcgtctcaattagatggccagcaacacagacctatgcattgccttctatgaatgtgccgttatgcaggcagctgtgtaattggatgggttttttttttttttttttttttaaagacattttaatgcacccactatcttcagcaggctttgttgtgttaagtctcagcacatgttggatgggtggccatccagcggacatctccttcctgttgtttcagatacagccaggctgatgccctgaagtatgtcggcatcgaaagagaaatggaaatcccttgacatctgctacctcctcccccctcctctgaaacagctgccttagcttcaggaacctcgagtactgtgggcaatttagaaaaagaacatgcagtttgaaattctgaatttgcaaagtactgtaagaataatttatagtaatgagtttaaaaatcaactttttattgccttctcaccagctgcaaagtgttttgtaccagtgaatttttgcaataatgcagtatggtacatttttcaactttgaataaagaatacttgaacttgtc

SEQ ID NO: 90 - DNA, 330955 bp, Homo sapiens
ggtttcatatgaactctcccgccacccgggaacagtggctgccaccgtttgtgttttcccgagtttgaattcttgcaggtaggggaaacttccgcgaatttaggacagagagcaatcctgttattaaggcttgcaagtcgagagaaaggagagatggatcactttgcaggcagcagtagcagaaggacagacttggcgggttggttgtttggggcagacacccaggtaccagggaggagttggggagagataggtttgccagtggagtgaggaggggtgttggggatggaacttttgtaaggcacttgtggatgctcccgaaaaggagttccgaaagacagttgctctgtttcccagagtcataacagaggaagtgagtaactggacccagtccatcaagtaagaccctcatttagccagaacctacagcactttcctctaagttcaggattgcagaccacgtaaaaccttatgttaactcttgggatcgtaaagatccaagaacagtgacacacaggcctataatgagcaggcaacatcacctgactttcatgttgctgaaaattaggatcaccacctgcatctgctctagcgcctctcccacccccattacaaaattattataggtgtattgtagaaaatctggaaacgagagaaggacatcacccaggaattgccactgctaacattttgtgcatgccctcaaatccattttttttctgtgtttgtggaattattttttcgtgttttttcttttttttcccccaactttgttttccatcattttacgctttttgtgtacttccttctaaggtgaccaagatggagttttctggaagaaagtggaggaagctgaggttggcaggtgaccagaggaatgcttcctaccctcattgccttcagttttacttgcagccaccttctgaaaacatatctttaatagaatttgaaaacttggctattgatagagttaaatgtaagtactatttaaattagaatgtatatattcttgagaagctcacttaccctttgtgagaatgaatgaaggtaattcatttccttcattcagcaatccattcaacaagtatttattgaggtaattcatatccttcattcagcaatccattcaacaaatatttgttgagggtttggtactcattcatttatttattgtacaatgcatattattgagtgccattatgttctaggtggcagggattttgagatgaataatgttattttttgttgaagttttattctagtacatggagacagacatccaaaataatagtcataattcagtattttaactgctctagtagaagtaaatggtagtgctgttgaaacaaagaagtgggagtgactgacttagtcttattaaatgagcttcttagagaagttgaaatgtgatctggacatactgaagaatgagtagaaattttccagcagagaagaagtgaagagtttttccaagctgagataatggcctatgcaaaggcttggagcatgaaagagaatttcatatttgagctaacagtaacaagttcaggaattcagggtggatggagaagtatggagggcattttgtgccatgctaatgatatgatattggggtgtaagaaggatgtggccaccgtcctgggggcctacttaatcctcagtgtgttgctagagaaaagaatgggctagacatgaattgaaacagaaacactagcgttgtcttcagagtttatgttccaggatatccctgtggggaaatcagaaggaaaggtgagatactgttaatcattcttagaggagcagggtaagcactgctaatacagagaggaggcactcagtgcctgtgtgttgaatgaaagaatgaagacaagggagaaaagggttttagaaagcttagcagtgtcaatacttcatagggattaagatggtgattgaaaagtgtcccttgggtttggcacttgaggtgaaatgataagggcctgaactatgataatgacaatggcagtggtaggaagggagagagttaagggatactgaggagttagcattgataggatttggtgactggatatgaggagtgagggagcaggtgtggagtggctgcagttcctgcttggatgatctgatgcatggaaactctgctgctggagatgggcatggcaggacgaagagtaggaatgaggggaggataattaatttggatacccatacctgtgggacatggggtttatgttcaggagacaattagaagttcttcattcttgacttcaaaaatgcctccagagaataattcatctgaggaaagattgatatggtgctttaggaacctttgaacagtatgtagcatctgttcaggatggttcatttggctgtttggatggcctttcttcttcactgttgtgctctgtcctcggcttcatcaggaaaggaagggatgctttttttctgttgaatctatgccaagtaaatgatgcctactgcctaacaggcagctcccatacgaaggatgcaaacaaggagtgcctagtttttttttccatactgacatacttttctgttcctcaggaatgattattcaccatccatccctcttccctgattgagaatccctggtattaaattatgctgtgggacatggatattttctgcacatagatggacattatcctcttataagcatatgtagtttatatgatgtcgttacaggaaataaactggcaattacctgtcatgttctgtaaacaagtaattatggaattgccctccatagattttgtcttggatttagttttaaaacattatcttgcatttataccttttttcttttttttagtgttaaaatcagttgaaaatcttggagtgagctatgtgaaaggaactgaacaataccagagtaagttggagagtgagcttcggaagctcaagttttcctacagagtaagtaaaaaaggaaaaaaaagttccttcagtttctatgcatttatgtattgagtgtcacttgtgggaaagatattatattaggcactgggcttttataaagactaatgtatcattagcctgaaggttcttcagtgtattaggggtgattgacatgaagtcagatgattataatatggcagggtttctcaacctcaggactaacatcattttgggtctgataattccttgttgcagggattgttctgtgcactgtaggatgctcagtagcatctctggcttctacccctacatatttccagacatgccaaatgtatcccgtgcaatacaggatgatgactgtgtttatagatgcatgctccaggaactccaaaaacatacataattatgcagctcagattggggaggtttgggaaggctttccagaagaggtagtagtggagctgcatgttgacagatgtgattagattttcattttgggaagatgactgccagcagcagattgacagggtcatgtctgttaggagggaaaccagttagaagcccggaaatgatgagagtctgaattaaatgagagaaggggaccggttgaagagacattaagaaggtagaatcaaaaggttttagtgactgattgtagggggaatggagagagaagagttataaatgacacccaggtttctagttaggaaaattagtggatggtggtaatattttgagatgtgatatgcaggaggagaagcaagtcttggaagacgtagagtttagttcttaacatgaatttgaggtgcctgtggagatgtctagtggacaattggatatacaggtctgaatatacaggaagacatgtggtgggagtagatttagcagaaggttggaatcatcaggagtaggtaagagcaccctagaaaaatatttgagtgagaagagatgacagtggaagttaagacatgaggaataccaatattgaaggtaaagtggaattggaggaatttgggaaggagaatggaaaggagctttctcagaagtaggagatgaaccaggatagtagtgtcatagaagccaaggagggctagagtttcaataataatgatcatgatattaataatgataatagggaataacagcagatatttatattaatagtatgtttgctatgtaccagattttgttctaagtgcattacatatattaacccatgtatgtaattcatacagcagtcttatgaggtgggtattattatcatccctattttacagatacagcctatttattcacagactgaataacttgcccaagctcataagatggtaaatggtggagccaagatttgaatctgggtattttgtttctgtagtggtgcttttaaccacaatagtttcagaagcttaagatagattatgtaagatgaattgtacagtgtccattggatttagcagctggatgggcccttatagataggggcagagaccagaacaatgacagtggttggagaaggaaggtggagcggtggatatagaagatgtacttttttaaaatgtgtagctgaaaagagaagagaaatagggcagaatataggggttgttttagggaaaagagaagatatacaagcacacacttgtacatatatgacaggagatacttaaacatgtttataagctgagcagaagatctagaatagaatggggaagaggggagcttgaagttgaaactttgagagagcatttgataagtcagggtctttaagaggcacaagcaaatgggttgcggggtttaggtgcaggaattagcttttcatatggtttggctgtgtccccacccaaatctcatcttgaattgtagttcccataatccccatgtgtcatgggagggacccggtgggaggtaattgaatcatgggggtggttacccccatgctgctattctagatagtgagttctcacaagatctgatggttttataaggggcttttccctattttgctcagcacttctccttactgccaccatgtgaagaaggacgtgtttgtttccccttctgccatgattgtaagtttcctgaggtctccccagccctggggaactgtgagtcagttaaacctctttccttttatgggtttactcagtcttgggtatgtctttattagcagcatgagaatggactaatgtagctttacatgccaggaagaggagatgctttgtagagatgtatggaaggcaacacaacatgtgtatgcggaagcttgggactgaaggattctgcctggtagcctttattttctgtaaagtaggtgaagtcatctgttcagagagaagggaaaggtgctatagtaggggtcttgggacaactggtgaagactgacgattttctgagaagtgaggaaggagatgattttgtgtcgaatctcaacactgctgcttactctggacaagctttgtgaccctgaacaagttacataacttctctgtgcctcagtttccttatctgtaaaataagattatagtagtgcctccctcatagggtttttttttttttaaaggattaaatgggttcatgccttaaaaattcttagggcaccgcctggtacctagtgagtgctcaagacatgtttgttcttattattttggatccaactgttggtaaggatctagttgagattataggccacgaaattatattttccaaattcccatagttgtgttttttctccagaggttcttagcattttgagaataggactgcagagtgtagttgtagattaagaatctaggttttgccaaatggttgaaattaaagaagctgaggttggtgtaagaagtggttgaggtggtgagcaccttggatataggctggataagaagaaaattaaaagagaggggttggtgggaagaaaatagtgcggtccaaactcaaggggttttgtcaagattagtttacttctcggtttcatctgattgatagcttaaggtaaatgataattatcctgaaaagcatattaagaaatgttttggcaatgagaacacatggacacagggaggggaacaccccacaccagggcctgtcagggggttggggtcaaggggagagacagcattaggacaaatacctaatgcatgtggggcttaaaacctagatgacgggcagcaaaccaccatggcacacgtatacctatgtaacaaacctgcacattctgcacatgtatcccagaacttaaagtaaaaaggaaaaaaaaaaaagaaatgttttgggactgggtgtggtggctcatgcctgtaattctagtgctttgagggactagagtaggagtcttgaaaccaggagttcataaccagcctaggcaacatattgagactccatcatacagaagataaaaaattagcggggcatggtgggtgtcgcttgtagtcccagctgcttgggaggttgaggctggaggatcacttgagcccaggagtttgaagttacagtgagctgtgattgaccactactctccagtctgggtggtagagcaagaccccatctctaaaaaaagaaatgtttttgaaacttactttaccattggcttaggctggctcagtatttccttacacctcttaccattctaatgcatttattttattcatgtgtcattatttttaaggaaaacttagaagatgaatatgaaccacgaagaagagatcatatttctcattttattttgcggcttgcttattgccagtcgtaagtatatgtttatattctcacagtcaaatctggtgtcatgggttataaattggtgtgtggtaagttgatgtgttgtgctaaacataggaaaacccagaataacatcaggagccggttgatcatggggttgaacactgacagtaaattgtttggaagaaattgtttacttaaaaatattgaaaaaaattctatcgcagaattttgcctgatgaaacacttcttaagtttgtgagatagactcttcatttgggattttaaattggaaaggattttattgggaagaaggacttttgatatttttcctgcaaaaaaatggtaatatttataagaaacaattaatgaaacccacacttgaatttgatacaggtttttggaatttgagctctatgggccagttaaatcgaagatatttttgtttggtagttggtttcttttaagttaatagtgccacccagaggtagtaaagttagttgcttttttaaaaattgtttttccctcacatgttaattttggtcacataatttagttatggctgtctttttttaaaattaataagcttatcaagtgagactctggaattgcttactatcccaagataataattgagaaattacttaccagttttggttctagagtttttcttctgtaaaaaagcatatgtagtttgtgaaatttatataataaatatgttgctgacaatctgtgaaaatctcctaaaaatgtgaaatcatattttgcatccagtagggtaattattttattatataacgataatgcccattagtatctgccttataaatgaacgttattgcttttaaatattgtggtatatatgtgcatattaaattttgtgaaattatcaattataaagccataagcaaagtttcctttgcaaagttaatctgatcaaagttgccttaaaaaatttggtgtcttttatttggcatttataaagacacctcaagccaaaggagtgccccatttccccattttcttttttttttctcttttctctctctctcttttttttttttgagctagggtctcatgccattacctaggctggagtacagtggtgtgatctcggctcactgcagcctcaacatccgtgggctcaggtgatcctcccacctcagcctcctgaggagctgggactataggcacatgctaccatgcctggctaatttttttgtagatatggggttttaccaacttgcccaggctggtctcaaacttctgggctcgagcaatctgcctgccttgacctcccaaggtgctgggattacgggcatgaaccacgacgcccagcccctattttctaacataaaatgaatattttgcagttacattaaatgcatgaagtattttatgttatttaaaaataatgcagctagtctcgaagcattcttgtatttaatctttttaatttttaacaccccctataccttgtacccaacccatccttagaagattgtgatatgtggtattgatattctccttaccgtgatagaggacttgcatgtttttaactgctgtccattggcatcttgctgatgtttgaatattgttttataaacatttcttagatttaataattactggatttttagtttgtactcataatttctgtcttcatttcagtgaagaacttagacgctggttcattcaacaagaaatggatctccttcgatttagatttagtattttacccaaggataaaattcaggatttcttaaaggatagccaattgcagtttgaggctgtaagtatatttttgtagttatttctaattgttctcaccattcatttttcccttctgtcttaagtgctggtactaatgtgtagtgtgttctctttacattctccaagtacctgcctgaaacagtagctaatagctttggataacaatatatctttccttctctatgactagaagaaaaggactccttaataacaaagtctcacacttacttgctctgttaaatgtgtgctttattaaagcacaagaaggtttagtttataaaggttcatctttaaccaaaattttgtcggccaaaataaagctaataatgtgttaaactagacaagtggtagtttcttatttatagtcgtgaaatttagaggaggtaatactttatttaaaagtcagttgtcaggcggggcgtggtgcctcacacctgtaatcccagcactttgggagtctgtggtgggcagatcacttgaggtcaaaagtgcgagaccatcttgaccaacatagtgaaacccccactctacaaaaaatacaaaaattagccaggcatggtgctgcgcgtccataattccagctagtcaggaggctaaggcatgaaaattgcttgaacccgggaggtggaggttgcaatgagctgagatcatgccgctgcactctagtctgggcgaaagagcaagactccgtctcaaaaaaaaaataaaaaccataaatcaaaaatgtcagtaagatctgtatgaatagttttaaaaaataattttgcagacatatctgaatgatttacatattgtaattatataaaaaaagaagagatctttgggactcatttaatggggatgagtattggaaatagaatttgtatcttttttttttttttttttttttttttgagatggagcctcactctgtcatccaggctggaatatgcagtggcctgatctcggctcactgcaacctccaccttctgggttcaagcgattctcctgcctcagcctcctgagtagctgtgactacaggtgtgtgccaccatgcctggctaatttttgtatttttagagacgtagttttgccatgttggccagggtggtcttgaaccccctgacctcaggtgatacacccgcctcggcctcccaaagtgctgggattacaggtgtgagccaccgtgccgggcctagaatttatgtcttttaggtagatatatgccacaatgggaatgtagaaacattatgttttggaagttttagagcagtcagatggtagtaggactggcagagactctattttgttgttggaatgcgtggcttaaagccaaataaaataaaaaagtagaagttgcaataggtgaaagacattgtcctgtctgacaagtagaagacatatccactgtagcaaggaacactatggagtatatgagttagggaaaagagactgtgaagggaagtgaacaaacattttgtagacgtttagtgtcaaatatatgctaggtaggcagtttctatagtttctttcatttacttcatgaggtttctaagtcacatctacctttgcatagacagatgtcatgcatggtaccatctgaaccaaacccactgcatcttccactttgcttttaactttgatccttggtgaagtccattattgcaattatcaattacagttaatttatccattcctattagaaatagtttattttttgcttttgttgaaattactgatttttagtaggtcatagagagaggtgtccttgagaaggtctattatttattctagggcagccatctccaacctttttggcaccagggactggtttcatggaagacaatttttccacggactgaggtcgggggatggggaggggtgtggatggttttgggatgaacagatccacctcagatcatcagtcattagattatcataaggagtgcacatcttagatctctcacatgtgcagttcataatagggttcgcactcctataagaatctaatgcctccactaatctgacaggaagtggagttcaggtggtaatgctcgctcactgctcacctcctgtgcagcctggttcctaatgggccatgtgctggtgctggtattgtggcctgagagttggagaccccagttgtagagtgtctcagcgtcacatatacttttttaaataatagatttattgagctagaattcacaaatcttgacatgcacccttttacaatgtataattcattggtttttagtgtaattacagattgtgcaatcaacactactatgtaattttagaacattttcacctaaaaatgaaacctcttacccatttatggtcattccctattcttcctctcccaacccttggcaaccactaacctgctttctgtctctggatttgtctattctgaacatttcatataaatggagtcatacaatatgtggtcccttgtggttgacttcttttacttagcataatattttcaagtttcatctgtgctgtagaatgtatcagtattaattttttaattgccaaataatattttacctgttcagcattcgagggacatttggatggtttccatattttggctattatgaataacgctacagtgaatatttgtgtccaggtttttgtgtgaatatgttttcctttctctcaggtgtatacctaggagtagaattgctaggtcatagggtgattctgtgtttaaacttttgaggagctatcaaaatgttttccaaagtggctgtatcattatatatcttaccagcagtggatgagggttccactttctccatatcctcaccaaaaattgttaccttttaaaaaaatatagccatcatagtgagtatgaagtggtatgtaattgtggttttgatttgcatttctaatgaagctgaatatcttttcatatgcttattggtcatttgtatatcatctgtgaagagatgtctgttcaaatcctttgcctgttttgtagttgaattgtttggctttttattgttgagtgttctttacatattctggatacaagtccattatcagatatatgatttacaaatattttcccccactctgaaggttgtcttttcttgatggtattgtttgcaacaaaaaggtttttttttttcagatgaagtctaatttatctttttttcttgtcacttgtgcttttggtattgagtctaagaagtctttgtctaatgtgaggtcataaagatttactcctacagttttttctgtaagagttttgtagttttagctcttacgtttatatctgtggttcattttgtgttaatttctatacacggtgtgaagtaagggtccaacttcattcttttgcatgtagatatctagttgtcccagcatcatttgttgaaataaccattctttcctcattgaattgtcttggcacacttgtcaagtcagttgactgttgatatggtttgattgtgtccccacccaaatctcatcttgaattgtagttcccataatccccacgtgtcatggaaaggacttggtgggaggtaactgaatcatgggggcaatctcccccatggtagtctcatgataataagttctcactagatctgatggttttataaggggcctccccctttgcttggttctcattccctcccctgccgccctgtgaagaggtgccatctgccatgattgtaagtttcctgaggcctccccagacacgcagagggctcaggattaaacctctttcctttataaattacccagtctcaggcagttctttacagcagcgtgagaacagactaatacaactgtaaatgtaaacatttatttcagtactcttaattttattccattgatctgtctgcttatccttatgtcagtagtatgtggtcttgattattggttactgtggctttattgttaagatttaaaattgagaagtatgagttctccagctttgttcttttttaagattgttttggctgctctgggttccttgcattttttaatgaattttgggatcaacttgttaatttctaccaagaagctagctaggatttacactgggattacattgaatctgtagatcagtttgggaggtattcttttgtaatgatattaagtcttccaatccatgaacatgggatgtctttctatttatttagatcttctttaatttttttcaacaatgtcttgtaattttttgttacatttatacctaaatattcttcaatgttattgtaagtggagttgttttcttcatttcatttttggaatgttcattgctagtatataaaaatccaggtgatttttgtatattgatcttgtatcctgcaaccttgctgaacttgttttttttttttgtttttgtttttttgtttttttgtttttttttttttgagatggagtcttgcactgtagccgaggctggagtgcaagctccacctcctggattcatgccattctcctgcctcagcctcccgccggccaccacaccctgctaattttttgtattgaacttgttttttaattctaacagttttatagtggattcattatgagattatgtttactacagagatattctgactcctttctaatcaggatgctttttgtttctttatttttgcccaattgtccagctagaatctccagtacagtgttgaatagaagtggcaatagcagtgatcatgatctcaggggaaagcatttagtctttcactatgttgcatggttttagctgtgagttttttttatagatgccctttatcagattgaggagattttcttctaattctagttgaatattttcattaagaaaggatgttgtattttgtcagtgcttttcctgcaccaattgagatgatcatgtggtttctgtcctttattaatatggtgtgttgggccgggcgcggtggctcacacctgtaatcccagcactttgggaggccgaggtgggcggatcacaaggtcaggagtttgagaccggcctgaccaacatagtgaaaccccgtctctactaaaaaaaaaataccaaaaaattagccagacgtggtggtgcgtgcctgtagtcccagctactcaggaggctgaggcagtagaattgtttgaacccgggaggtggatgttgcagtgagccgagatcgtaccactgcactccagcttgggcaaaagagtgagactttgtctcagaaaaaaaaaaaaaaaagttctgttacattaattgatttttggatgttacaccaaccttgcaatcctggaataaatcccccttggtcatgttatataatcttttaatatgctgcttggtttggtttgctagtattttgttgaggatttttgcatctatattgataagggatactggtctgtaggttttttgtgatgtctatatctggttttggtattaggatcatattggcctcatagaatgagttgggaaatgtttcctcctcttccgttttttggaggaggttgtgaaggattggtttaaatgtttggtagaatttaccagtgaattaatctgggcctgggcttctctttgtgggtcattaaaattaccaattcattctctttacttattatgaatctatttaagttttatattactttttgagtcagttttagtaatttgtgtcttttttggaatttattcactttatctaagttatctaattgattcatgcagttattcatagttttctcttatccttttgatttctttaagaaaataaaaggattggtgatgatgtcttctctttccttcctgattttaacaattagagtcttctctttttttttgtcatctaggtagaggtttgtcagtgttactggatttgttcaaagaaccaacttttggtttcattgatttttctgtgttattctctagactctatttcactagtttttactacagtctttagtatttccttccttctgcttgctttggtttggtttgctcttttcttctagtttcttaaggtaggagtttagggtatttatctgagatattttttctttttatatgtagacatttacagctataaattttcctgtaagcactacttcagatgcaaaccatgagtttttgtatgctgtgttttctttttcatttatttcaaagtattcttttttactttgacacattgattagaagtgtttaatttccacgtttttgaatttcctgaacttctgttactggttttaatttaattccattttagtttgagaatatattttatatgactgcaatcttttaaaatttattgaattttattttatgacctagcatatggtctgttctggaggatgttccatgtgtgcttgtgaagaatgtgtatctgctattcttggttggagtgttctgtagatacagtctgtaagatctggttggtctatagtgcttttcaaagcttcggtttccttgttcatcttctgcctatttgttctatccattattgaaagtggggtactaaagtcttcaactgttattgtttatttattatctttaattctgtcaatttttgcttcatttattttggggctctcttgttagttgcatatatgtttataattgttaaatcttcttgatgggttgacccttttatcattatgaaatgttcctctctagtaacatttttttgttgttgttttaagttatgtttgtttgacattagcatagccattccagatcttttatggttgttgtttacgtgatatgtctttttctattctttttattttcatcctttatgtgtgtttgaatctaaagtgtgtttgttgtaaatatcatatagttggatcatcttcttttcttttttattcattttggaagtctctgacttttgcatggattgttttatccatttatgtttaattactgataacttagtatttccgtgtgccatctatgtgtttcctatgtcttaaggtttttttgtttctgtatttctccattactgccttctttgtattaaaatggtattttctagtgtaccattttaattcctttgctgtttattttactgtattttttgagttattttcttcgtggtttcccttagaattacaattatattttattttaaaacaatctagttgggattagcattaagttaatttcaatagtgtacaaacttttgttcccatatgctctgttccctactccctgccattgtcctagtatggtcatacaaattatttcttaatatatcaacagaggtaaactttttgtgttctagattgtatgaaaaatgtatttataatactgtcaaacttgagtgtagtttgccttggtatacaggcaaatacctgtatgttgggaatattttttattggcattttggagatattgcttgctgaaccttttagcttctagagttgctcttgagaagcctgatttcattttgacttcttattctttgcatgtaactttgtgtcctttgccagtcccactctcttgtgtagtgaactttcatggcgatgtctgcaccttttttcacttttttgggttgggaacttggtggactcttttaatctgaagatttgattcttcagttagaaaatttctttttattattgctttaataatttcttctatgttctctttttataacctcttgttaggtggaatttatattttctggattggtactcttattttcttttcggtcctgacattcaatctttgtgtttttattttattttctgaaaactttcatcaactgttttctcaattttctatttatttatttttccctcctgtgtttaatttttttcttttaaatttacttaaaaattgaatataaaattgtatgtattcactgtaaaatataatgttttgaagggtacattgtggaatgattacatctagctaattaacaaatgtattacatcaacagttatttttgtggtgaaaatacttaatatccactcacttagcatttttcatcaatacagtttgttgtcattaactgtagacatcatgttgtacaatgggtctcttgaacttaatactcttaactgtgattatgcatcctttaacagacatctccctaacctcttttcctccctaaccaccccagctactggtaatcactattttaccctctatttctatgagatcaacttttttagattccacatatgagtgagatcatgacatatttgtctttctgtgcctggctttatttacttaacgtaatatccctgtttcattcatggtgttgcaagtggcaggattttcatttttttttatgactcaatattattccgttatgtatatatattgcatttaaaaaaatccatgtatctatcggtggacacttaggttgattccgtatcttggctattgtgaatagtgctgcagtaaatatgggtgtgcagatgtcttcagcatactgatttcatttccttcagatacatacccagtaatagattttgctggaacatatggtggttctatttttaattttttgaggaactttcatattgtttttcatttctacaaaaaataaaaaatagctgggtgtagtggtgcacacctgtaatccagctacttgggaggctgaggtgggatgattacttgagcccaggtgttggaggctacagtggactatgatctgtagcccaccctgggctacagaacaagaccctgtctctcaaagaaataagaggataataacgattttcacctcacagattagtgaggtttaaatgaggtagtgcgtatagagtgcttagtactgtgcatggaatatatgctgggtagtaatattacggaggatacagaagcagcatatgcctgtattgtgaagaagttcggagtcaattagattgatatgtttttactgcaattaaaaaaatggttttggaataggaacagctccggtctacagctcccagcgtgagcgacacagaagatgggtgatttctgcatttccatctgaggtaccgggttcatctcactagggagtgccagacagtgggcgcaggtcagtgggtgcgcgcaccgtgcacgagccgaagcagggcgaggcattgcctcactcgggaagtgcaaggggtcagggagttccctttcctagtcaaagaaaggggtgacagatggcacctggaaaatcgggtcactcccacccgaatactgtgcttttccgacaggcttaaaaaacggcgcaccaggagattatatcccgcacctggctcggagggtcctacgcccacggagtctcgctgattgctagcacagcagtctgagatcaaactgcaaggcagcagcgaggctgggggaggggcgcccgccattgcccaggcttgcttaggtaaacaaagcagccaggaagctggaactgggtggagcccaccacagctcaaggaggcctgcctgcctctgtaggctccacctctgggggcagggcacagacaaacagaaagacagcagtaacctctgcagacttaaacgtccctgtctgacagctttgaagagagcagtggttctcccagcacccagctggagatctgagaatgggcagactgcctcctcaagtgggtccctgacccctgacccccgagcagcctaactgggaggcaccccccagcaggggcagactgacacctcacatggccaggtactccaacagacctgcagctgagggtcctgtctgttagaaggaaaactaacaaacagaaaggacaaacacaccaaaaacccatctgtacaccatcatcaaagaccaaaagtagataaaaccacaaagatggggaaaaaacagaacagaaaaactggaaactctgaaaagcagagcgcctctcctcctccaaaggaacgcagttcctcaccagcaacggaacaaagctggacggagaatgactttgacgagctgagagaagaaggcttcagatgatcaaattactccgagctacgggaggacattcaaaccaaaggcaaagaagtggaaaactttgaaaaaaatttagaagaatgtataactagaataaccaatacagagaagtgcttaaaggagctgatggagctgaaaaccaaggctcgagaactacgtgaagaatgcagaagcctcaggagccgatgcgatcaactggaagaaaagatatcagcaatggaagatgaaatgaatgaaatgaagcgagaagggaagtttagagaaaaaagaataaaaagaaatgagcaaagcctccaagaaatatgggactatgtgaaaagaccaaatctgcgtctgattggtgtacctgaaagtgacggggagaatggaaccaagttggaaaacactctgcaggatattatccaggagaacttccccaatctagcaaggcaggccaacattcagattcaggaaatacagagaacgccacaaagatactcctcgagaagagcaactgcaagacacatagttgtcagattcaccaaagttgaaatgaaggaaacaatgttaagggcagccagagagaaaggttgggttaccctcaaagggaagcccatcagactaacagtggatctctcggcacaaactctccaagccagaagagagtgggggccaatattcaacattcttaaagaaaagaattttcaacccagaatttcatatccagccaaactaagcttcataagtgaaggagaaataaaatcctttacagacaagcaaatgctgagagattttgtcaacaccaggcctgccctaaaagagctcctgaaggaagtgctaaacatggaaaggaacaactggtaccagccactgcaaaatcatgccaaaacgtaaagaccattgaaattaggaagaaactgcatcaactaacgagcaaaataaccagctaacatcacaatgacaggataaaattcacacataacaatattaactttaaatgtaaatggactaaatgctccaattaaaagacacagactggcaaattggataaagagtcaagacccatcagtgtgctgtattcaggaaacccatctcacgtgcagagacacacatagcctcaaaataaaaggatggaggaagatctaccaagcaaatggaaaacaaaaaaaggcaggggttgcaatcctagtctctgataaaacagactttaaaccaacaaagatcaaaagagacaaagcacgccattacataatggtaaagggatcaattcaataagaagagctaactatcctaaatatatatgcacccaatacaggagcacccagattcataaagcaagtcctgagtgacctacaaagagacttagactcccacacattaataatgggagattttaacaccccactgtcaacattagacagatcaacaagacagaaagtcaacaatgatacccaggaattgaactcagctctgcaccaagcagacctaatagacatctacagaactctccaccccaaatcaacagaatatacatttttttcagcaccacaccacacctattccaaaattgaccacatacttggaagtaaagctctcctcagcaaatgtaaaagaacagaaattataacaaactatctctcagaccacagtgcaatcaaactagaactcaggattaagaatctcactcaaaaccactcaactacatggaaactgaacaacctgctcctgaatgactactgggtatataatgaaatgaaggcagaaataaagatgttctttgaaaccaacgagaacaaagacacaacataccagaatctctgggacgcattcaaagcagtgtgtagagggaaatatatagtgctaaatgcccacaagagaaagcaggaaagatccaaagttgacaccctaacatcacaattaggattagaaaagcaagaacagacaaatttaaaaggtagcagaaggcaagaaataactaacatcagagcagaactgaaggaaatagagacacaaaaatcccttcaaaaaattaatgaatccaggagctggttttttgaaaggatcaacaaaattgatagaccgctagcaagactaataaagaaaaaaagagagaggaatcaaatagacgcaataaaaaatgataaaggggatatcaccactgatcccacagaaatacaaactaccatcagagaatactacaaacacctctatgcaaataaactagaaaatctagaagaaatgggtaaattcctcgacacatacactctcccaagactaaaccaggaagaagttgaatctctgaatagaccaataacaggatctgaaattgtggtaataatcaatagcttaccaaccaaaaagagtccaggaccagatggattcacagctgaattctaccagaggtacaaggaggaactggtaccattccttctgaaactagtccaatgaatagaaaaagagggaatcctccctaactcattttatgaggccagcatcatcctgataccaaagccgggcagagacacaaccaaaaaagagaatttgagaccaatatccttgatgaacattgatgcaaaaatcctcaataaaatactggcaaaccgaatccagcagcacatcaaaaagcttatccaccatgatcaagtgggcttcatccctgggatgcaaggctcgttcaatatacgcaaatcaataaatgtaatccagcatataaacagaaagacaaaaaccacatgattatctcaatagatgcagaaaaggcctttgacaaaattcaacaacgcttcatgctaaaaactctcaataaattaggtattgatgggacgtatttcaaaataataagagctatctatgacaaacccacagccaatatcatactgaatgggcaaaaacgggaagcattccctttgaaaactggcacaagacagggatgccctctctcaccactcctattcaacatagtgttggaagttctggccagggcaattaggcaggagaaggaaataaagggtattcaattaggaaaagaggaagtcaaatcgtccctgtttgcagatgacatgattgtatatctagaaaacaacattgtctcagcccaaaatcttcttaagctgataagcaacttcagcaaagtctcaggatacaaaatcaatgtacaaaaatcacaagcattcttatacaccaacaacagacaaacagagagccaaatcacgagtgaactcccattcacaattgcttcaaagagaataaaatacctaggaatccaacttacaagggatgtgaaggacctcttcaaggagaactacaaaccactgctcaaggaaatgaaagaggatacaaagaaatggaagaacattccatgctcatgggtaggaagaatcaatatcgtgaaaacggccatactgcccaaggtaatttacagattcaatgccatccccatcaagctgccaatgactttcttcacagaattggaaaaaactactttaaagttcatatggaaccaaaaaagagcccgcatcgccaagtcaatcctaagccaaaagaacaaagctggaggcagcacactacctgacttcaaactatactacaaggctacagtaaccaaaacagcatggtactggtaccaaaacagagatatagatcaatggaacagaacagagccctcagaaataacgctgcatatctacaactatctgatctttgaaaaacctgagaaaaacaagcaatggggaaaggattccctatttaataaatggtgctgggaaaactggctagccatatgcagaaagctgaaactggatcccttccttacaccttatacaaaaatcaattcaagatagattaaagacttaaacgttagacctaaaaccataaaaaccctagaagaaaacctaggctttaccactcaggacataggcatgggcaaggactttatgtctaaaacaccaaaagcaatggcaacaaaagccaaaattgacaaatgggatctaattaaactaaagagcttctgcacagcaaaagaaactaccatcagagtgaacaggcaacctacaaaatgggagaaaattttcgcaacctactcatctgacaaagggctaatatccagaatctacaatgaactcaaacaaatttatgaggaaaaaaaaacaaccccatcaaaaagtgggcaaaggacatgaacagacacttctcaaaagaagacatttatgcagccaaaaaacacatgaaaaaatgctcatgatcactggccatcagagaaatgcaaatcaaaaccacaatgagataccatctcacaccagttagaatggcagtcattaaaaaatcaggaaacaacaggtgctggagaggatgtggagaaataggaacacttttacacagttggtgggactgtaaactagttcaaccattgtggaagtcagtgtggcgattcctcagggatctagaactagaagtaccatttgacccagccatcccattactgggtatatacccaaaggactataaatcatgctgctataaagacacatgcacacatatgtttattgcggcactattcacaatagcaaagacttggaaccaacccaaatgtccaacaatgatagactggattaagtaaatgtggcacatatacaccatggaatactatgcagccataaaaaatgatgagttcatgtcctttgtagggacatggatgaaattggaaatcatcattctcagtaaactatcacaagaacaaaaaaccaaacaccacatattctcactcataggtgggaattgaacaatgagaacacatggacacagcaaggggaacatcacactctggggactgttgtggggtgggggtaggggtgagggatagcattaggagatatacctaatgctaaatgacgagttagtgggtgcagcacaccagcatggcacatgtatacatatgtaacaaacctgcacattgtgcacatgtaccctaaaacttaaagtataataataatttaaaaaaatggtgttgagtctttttgttttaggaaacaggaatttatgggaaatgtatgcagttttaacaagagtgttggtgtttaaaattactctagttgcttctagtctgtttgccatattttatttatttataaatttatatcctgtttcactttgctaatcatttgaggtgcattataatgaacctgtgcattaaagtaagatgcataaatttggataaacttgaaagattggctgaagtgatgattaatatccgtatgtatacatcccagtgtggtgttatacagcttctaaagggagcagtaactttgccttcttgtgtgactattttgatttttctagttcagtgattctcagtggggggataggatggagaggtagtcctcctagggtgtttattagaacgtcggtggaggttagtatagagtatagaaaacattatgccttatgtttttgaaatataaaccatagaatgtaaagcttgatcaagtatttgtggctgatggggattcatggaagatagagtaacaaagtattgcagagggcttgacagaataaccattcccgtgatagtctgcaatcactttccaggcagagaccttttcccatctttttcatggactctcccatggcatctgatactggtaattaaggcacttgaattcaggtgctgttgattagcttgtccccaggtctctgtaagctctttccatttcattgtaggctttcccaatttttatcatttcattaataggaacatgcacactttcatcactttggttagaatatttagtttgcatttgaaaactgctatagctagtcaggtatcagtgatgcttttagactcatgacaaagcaaggtttggggaaaagttactagcatttgtttcatgaggtggtgtctgatgtgtgacctgctgcctaagtcaggtgctgctgcataagttgaggtggaaggaaacagcagggagtgggcagccacggggccatcttgtttgtcacagaagctggattgttggcacacatgtctttgagtcaacctggacttaaagtgcttgtgtgctgtgtttgtgtgcatttctctgtcttttcggtttcctcaatgctgcagttgcttttatgttgatctacttctgtaaaataaatatatttttaccttaggaggagatgcagtgttatacctgagttgtattgtgtccttcgatggagaaatatgtacataaaaagggatcattaatttctggtgttctattactgacttgggcagtgcattgatacttttttagtctatactgggtttctggtggatagtagattctgaatccttatcatgtagtataggaagccttaatatgaagtgttcaaaaaggaaactgatatttttcattctttgacctatatgtaaataaattggattttaaatctgaaatttctaaggcgtttcaatgagtaaatattgctgtccatggtgactattttgcatctcccactgctgagttgattgacttaaccttggtcacattaaaggtgaatgggtaaggttaaacagattctattaatgtttcttcagttggccagttagggaaaggtcagctttggcagctgtcagccttacagacaaagggtttctgtgctctcgcagtctagagtctgacagcagcttctaatttacttggatgctttttaaaacctccttaagacagtcaagaaatatttcttattggctttgcaataccagtgggtctaatggtaggatgcttttcattagagtactacagaatggcagggacagtgaaaatgagcattcttaaagatgtggaagaatattctgtgtgtcacaaatgatgactctacctcatattaaaaagacctagtgttcagttgctatttatgttcagggaagtgagggcttttgggtgaaggcaagtgaagttggtaacctcgttgcctcactaaaaacaagtacacgtaaaactttgaattacttctgtttatttaaaagtagtttttcttatcctgagcctgacatctaaaatttgtttctcatcccttttagtttaaagccttaatttcttttatcttagaaattatttcatgtcattcttggttggtaattacttttcagtgaggatgaattcaagtttaatttgtcatttgttattgaaaatgtcaattatgaatttattaggagcctttggaggcttttctccagttaacattggaacattgagtttacgttgatttaatagttttaggtgtattgaattttaaaatacttttggtattctgtcttgatttctgagatactgcaagttggccttaaatagtcatagttttttgatcattttggcccttactgtgttgtttttattgtttattggtatagtttgggttgtcatagttcgtttcgaatgtgtattcattatcatgacctactccatttctattatgtaaaatatgaacatcccatgcattgatatacatgactctctttatacctaccctcttgggtctcaagttattataagcctattaacaagttgcaaagcaatttttgtgtgatgcctgcaaaatagagagctgtgtgtacctttttatatcttttgacacagaatgaactttgatacagccaataaggagtctggtggaacagctgagacaggacacacagatgtaacagtagaacaggctagagaacacatgtgtttgataagcctggaagcttttcacagggcttctggcaagccgttgactatgacaggagtgaaaatggagcctgaagaagagtgaagtgggatggtaaaacacacactctcaaacactcttagtggaaattacgtaaaaggaattaggaggaacgggattaataatcagatgaagagtgttaaagaaaaaaaattattcatgtcatttgttaaggatagtaaggaagactttattcaaaggggctactataataggtttttgtagtaggggagagagagaagctgaagttggaatatgataggataggtggggatttggagcaggggtcagggtggatggaaaattattaagaggtagtaaagtgacctagggaattttgctgaaggcagaccaggatcataagatattaaagatggtcagacgaagggtgggggattttccctaaacttacttagcaggattctcactgaaactgaattagcaggccttatcaagaagaggtttcaggagcttgacaagagttaggtcaaggagagagtctttgtcaagtgtcaaacataacttctgaatagagaaataaattgttttatgttccaaggctgtgaagtaggcaagattgacagtcccaggcagggtactctctgagtgttgagtgaatgtttaatgtctagagaaaatactaactgaattcaaaagatttatctcaattctgtttcataaacactagacatctttaagatgagtatagcaaaattgagtaattattttttttcaaggttaaatattagataataggtatatgttatatatgaaatgagcttttctattgagctagatttgagggattatgctgccttgcaaacttttatttgttctgtttctagggaagtttatgatttagaaagagcactgtgtatttctgttacaattgaatacctttcaaaatgatttaaatgaaggcattaacacagggcttcctttttaaaagtaaacactacaagtataatacttttgttctcatagtggtttttggcatcaaattattatggaagccaacctggtattattttatgtatatttattgggcagttacagtaaaatattgatacattttatatttggagaatggagaaaagtttattaagttttctagttagttgaggcctaaccatttatgcatatagttgtaaaaatacaccatggcagatggtcttagtgacaatattttagagttcacagaatttgggtttttctaatcaacctacaaaattagattctgctcatgataatatggtttaagcctagagatgctatggctaaatgtgaaacttcaagctgaattacccttaaaggctaaaattatcatatgcagaaatttccaaaatgacttgtgaaagtcatttctcttttttaaagttttcatatagcttttgaatataggactctttgtattcttattgttgatggctttccatgcctataacttttgcccttgaaaaaaaaagtatgtctttaaatgagctgaagtttcccccacacagagctatgtcctatttgttttataatgatatatatctatttcaattttattaatttttttttttgagacagggtttcactccattgcctagcttgagtgcagtgacgtgatcttggctcactgcaacctttgcctcctgagttcaagggtttctcttgcctcagcctccctaatagctggaattgcaggcatgcgccaccaggcccagctgatttgtgtattttttgtgtttttagtagagacggggttttgtcatgttggccaggctggtctcaaactcctggcttcaagtgattcatccacctcagcctcccaaagttctgggtctacaggcgtgagccaccatgcctgatatatatatatgtgtgtgtgtgtgtgtgtgtgtgtgtgtgtgtacatacatatatatttatatcctcaaagaatgaaattaattacactaaatataattttcagtgttaaatattctctgtagtttaccatttacattatggaatgtagtttccagaaaggggttctgatccagacaccaagagagggttcttggatcttgtgcaagaaagaatttgggatgagtccgtagagtaaagtgaaagcaagtttattaagaaagtaaagaaacaaaagaatggctactgcataggcagagtagccctacgggctgctggttggctatttttaaggttatttcttgatcatatgctaaacaagaggtggattattcttgagttttctagggaagagatggacaattcccggaactctgggtttctcccctttttagactatatagggtaatttttggatgttgccatggcatttgtaaactgtactggtgctggtgggagtatcttttagcatgctaatggattataattagcatatagtgagcagtaaggatgaccagaggtcacttttgtggccatcttggttttggtgggttttggctggcttctttaatgcatcctgttttatcagcagggtctttaggaccttttgtcttgtcatagccagtcttgctgaccctttgtctcatcctgtgcctgagaatgcctaacctcttgggaatgcagcccatcaagtgcgagcctcatttgatccagcctttgttcaagatggagttgctctcgctctactagagtcttttggcagtgttactcatggtttctgaaggtgttctgaaaaaagatactgagcttttaaatgtatactttttttttttgagacggagtctcactctgtcgcccaggctggagtccaatggcatgatctcagctcactgcaacctcctccgcctcctgggttcaaatgattctcctgccccagcctcccgagtagctgggattacagtcgcccaccaccatgcctggctaatttttgtatttttggtagagacggggtttcactatattggtcaggctggtcttgaactcctgaccttgtgacccgcctacctcggcctcccaaagtgttgggattacaggcgtgagtcaccacgcccagccatgtatacatttttaaaaattccataatctttataatctttccctctttcctccaagttccctgaaaagttaattctttttggctgaagtcttgtgtcatggtctagttcagagtctaggtcagattgccttatcctaggtcttttggatgagaataagaaccagggatgtggagggcaaatggagttgtaaaggtaatcattttgtgttctcagtctttgagtggcttaatctgagttacaaagggaggaggaagtagttgcgtaacaaatccatttggtccaggccctgtgaatatatccattctgctactccccacccctctgaaggcatacaaaggacaacagcacagttaatacccctattctggacttgtctccatttattctctgcttgcttctgtttgtttatctccatgactttcaaataccttgtgctgtacttcggctattgatacctgcctcctgtctggctttgtttcctgttcatctctggtcaaagtgtgctctccccattccaggagaatccttctgttatcttggagcttaatagccaaatatattccaattccctttagttggtccaaggaataaggcttctgtatgaatattggaaaacccagaggactgtttccagacttggatggggtccttgttttctaaaggaggaatatttattgatgactgtataagtagtggacttattaaggtttagatttatctggtgatataaggagactgaggagagattatcactaatagctaacatttgtaatgtgtttgttaagtgccaggcactttggtaaatacttcacatgggtaaaaaaatttaacttcttcttctgtggtagagacagttttgctctgtcgcctaggctggagtgcagtggtgtgatcacagctcactgcagccttgaactcttgggctgaagtgatcctcccacctcagcctcccaagtagctgggaatacaggcgcatgccaccctgcctggctaattttttcttttatagaaataagttcttactgtgttgcctaggctggtcttgaacttcaggccttaagtgatccttgcaacttggcctcccatagtgctggaattacaggtgtgagtcactgtgaccagccaggtttatgtaatttaatcctcacaacagctccatgaggaaactgaagctcagacaggttaagtaactttccttaaaattagtcttctaaatatttagagatgtataagtcacaaagcatgttactaaatatatgagtagatttcttcacagcttaactattgaaatgaagtggaatagatgctgacatttaaggtgacagggcccatcaaaagtgctatacaaacacaggtgtgagtttagagatttacattagtttcggaaattaaagcattaactataattttactgagatgtttcattttagctgacagttgttggcaggaatggaaaccaaatatattaaatataccattggtagctttctcggtataatattgccatctctagggaaaacattatattcatccaacttagtcgttgaggggtttgttttctagcccgtagtttttctatgccctttttgtttttcttctctgctaccttttgtttatctttttaaaaacatttttcagatcacattgtatattttagttcatgttcaacaattaactcatgtataatattcaaagatcagtgtaaatcaaaatccaggcagtaggtaaaaaatatatttttaaaattttaaattaagttttatcaggcagtagattttgtacttgaagtgggagtcattattttaataggccaggaaaagaaaagttatggacttgagttggttttttttactatctcacaagagagatgccatagaggaaagcctactgtttcaaactgagcctttcacaaggatggcttgttggttcagtccagtagttctggactataggggttatagtcacccctgctggatattttggccatctttatggtatttttggtgtttgtaaaaatgattggcaagtccaacaggtgtttagtagacaggagatggggatgctggtgcatttacagtgcactgagtagttctgtacaaccacagattttcccacatccttcctgccctttttttttttttttttttttgagacagagtctctctgttgccaagctgaagtgcagtggcgcgatctcggctcactgcaacctctgcctcccgggttcaagctattatctgcctcagtctcccaagtagctgggactataggtgtgtgccaccccgaccagctaatttttgtatttttagtagagacgggttttcaccattttcgtcaggatggtcttgatctcttgacctggtgatctgcctgcttcggccttccaaagtgctgggattacagacgtgagacaccatgcctggcctcctttttgactttttatattcatgtgaacaacaacagaaacccagaaaccaaaaaactaaactgtttctaattatctgaatctacaactaaacactgttctataaatcaacacaaaatatttttcccccatatttttggtataccctcattgttcctggactccaactagcctatgagttgaggaagataatactttgtttcgttctgagtgtttctgagttcgcttttttgacaaagaacatcactgatgtggtatttgaaacaccaatgcacacaccgtgtcagtttgcattggtaggtgggttattcccgatgtttttgctgatgggtatggtatctaactacttgatcatgtagtctagggcactgtgtctgatcaattatgtatgccactatttttttgttttaaatttttaaatattttatatatatttagttatggaattctattgatattaaaaaattgtgaattttatttttggatagtaatacaagtattgcaacatattttaagtattaaaatatttaaagaagcattgggtctgatcaggttgttaaccactagttccacccaaggtgtgtttctttgctttgcagattctcaggtatgattctgttacattcttgcgtgtagtattattagccctgactgtagcatatttcttattttttttgtctttttggaagatttaaagtagttttggcttacagttctacttttcttttttaacacttttctctttttaaaaaaagatattgtttgccttgctaatactaaagtagctttcactgcagtcacattgttttcataactcaagttatatctggatattttcctattttttgtaaaaacaaaaaaaatcttcttaaaccttcaatatgacttactttcagtacccttaagaacttattagcaaagcagatgaaggaaagagcccaaagcaaaaataataataataacttcttcttggaccccttcatatacagagttcaaagctcttcatttcttgtgaatgcagagcttcccagaatccctgtggaacagggcaagctaacctctcagataggaaggattaagactgattgtctgtttacagattttttggtggggatattcagttctttctatttcccttggagagttcttcatagaacatgtagtgaaggtgcctttttttctgagcttgtactgttgatatagtgaggtttctggtctttggatcacttttgtatagaatcctagaaatcatccatttatgactatgatttaaaatagccagtcttgaggaattctaatcataaaaataattctaattttcaaaattaattttatttatttacattttgatgatgttagtgtaaagaaaaccatagagaaatctcacatatcataaatcactgagagaactttgcctttggattaaaggaccgctgaaatttaacttgtcaatctgcaagcctcaaagataaataaacctcaggggaggcgtaggaggggtggtttgggatgagatgagtaggtcggggtgatctctttcccttgcttctttgagaaggctaagtgctgctagagctctgttctgaggaccagctggtgatagatgagcttcagttccttcttttttccagcaacagcagccttagtgtaatagtacttcagtgccgcgtggttctttcttccctttccagcttgaacacagacataggcccatcatctcattttttctaaccacagtataacctttacttttgtggacgtttcctagatgtcatatattctgtttacttaacattattttaatgataccatctcctttttttatttcaaggaaatgtgctcatgtattttccacattaatcttgattctggttttacatttttactaaaaagcagtttgtcatgggaaagagtggaagatgagactagcaagataggagggcaggaaggaattgtggaaggtttttgaggatcagggtgacatgttataatctagtatgatgaagagaactgcaacagctgagtaaataaaggattggggaattgagacccaagttgagacataaggtcaccaagtaattaattataggctgagtatcccttatctgaaatgcttgggatcagatgtgttttggatttctattttttttcagattttggaaagtttatcttatacacttactggttgagcatctgaaaatctgaaatgctccagtgagcatttaacctgagtgtcatgttgatgctcaaaaagttttagattttggagcactttggattctgtattttcaggtttggatgttcaacctgttgaatgttgagacttatggtagagacctcttagaaggatattgccagtgttcaggttaatgataaagataattatttgttgagcaaatagtgagtgaccaaatgaaggactgaatgaggatgtgaactatattagtagctgtgagaatggaaagaagtgggcagatgtggtagacattatggaaatagcctaaagacttgatggctaatggaatgtgcagtgaagatgactccaagccatctggtatagaggacaagagtagtgtaatgttagtaatgatagtgaacataaaaaaaaaggagtatgtttttgggttaggatagtatatttgatgtgaagatattgcttgtgagtgctatgggccagtagagatagacagtgggcagttcaaaatgttaggttgagttcaggagatcgttgttgaaagtatataatcacaatatcacagaaaatagtatttgcaactgtgaaaacaaagcttgctaagggagagaggatgaataagatctgggaaaattaatcttatagtagatttttcatgaccccgtgtaagttactgaccctttcaatgcctcattttcttctactataaaatgaggaaaattatagtatctccttaatagaattgttgtgaaattgaatggaatcatctatgtaaattgcatagagcttggcaggcatatagtaaatactcattaaaggttagctatcttattgtttattgaaggtttaaaattaaacaagtgatcttattagcagtgatatttttatttctcaagttaaaactgtttggtttttgtaggtgtggttagttgtaatcttggaactaattttttgtgataaatatgtaattcacgtttgagtatttttatttaaaagtgttcacttttcttttctttttttgagccagagtctcgctctgttgcccaggctggagtgcaatggcgtgatctcggctcacggcatcctccgcctcccaggtttaagcaattctcctccctcagcctcttaagtagctgggattacaggtgttccccaccatgcctggctagcttttgtatttttagtagagatggggtttcaccatgttggccaggctggtctcaaactcctgagctcgtgatccatctgcttcggcctcccaaagagctgggattacaggtgtgagccaccacgcccggcctattaaagtgcccacttttcttgacatcctctaagatgtagactttacccttggttgaatatatgtttttctttgattagagtggggtaaatgaagggtgatgatactcacactgaatcttgaatttgacacatttcttccaatgaaaatgggctgcaaggaacccagttgtatctggcaccgttttttagtttttttttctctgacacaggattactgtgctgtagaagtgtcatttgggggagccaaagcactgtactataatatatataccagtccattcagtgtagaaggggaaaaaaaatagtgtcatgaattgaagttcatgcttttcaggtgtttgtatgtttcttccttctgctttaatagtaaatggttagagggatttgttaaatagtaaatgaataaaactaaatgcagagcacaaatatagctagaattttaatttttttttacatttgtattttagttctattgatattttaaaggtaatgagaaattagcatcttcagttggatatgtgtcatatcccttcaaagctgtaattgctttaaattagactgtcaattccttgtctaattgagacccatggtgaaatcccaaaaaaaaaaaaaaaaaaaaagcagtctttggatttttccggtcagtgaactggctaatattttctgagttcctgtagatacaaagcactgtaaattatatttacaatatcaccacttgagtaagtacttaaagagacaattttggaactgtttggttgattagtgtacatcagagctattgtttggtttctctgggtagaggttgttcagggatgtaataggatctgcatacaaatagattgcaatttgtgtttagaaaggataacttacttttaaaattctgtctctcctgattttcatttagtttgctgtataccacttaaaatggattagaattcattttcttattcctgtttaaaataaccttggcctgattatttttctttttatttaccactcctcttgagacaggtgtgtgcacatgcacacatacataaagaagatctacggttttggtggtatttatagcagggaaaagagatgatttatttgaactttttagtagattactatcggtagtcttaggaaaagtctattttggaatttcactgcctcttttttatttttttattttttggtgagaggttgctagagcagaggggctgtctccaagaccatgtcttcatcagaaactggggtttaatagacgttagaaatggtatatatttcttccaccatctcttaagctcttctgtttattacctgacttttgtttatcaaattccagagttgcttacttttgttttgttagctaataggggtgcttcgggtgggttaagagaagaaatacttttttcaaaagtcaccatcattctgtgtgagagagaatgtaattcctatagagaaaagtaattagttagcttggtgtgttgtaatggcagctttgctatttttttgtactctttctctttcttcgtttcacaaagaaggttgacaagctacttacctttctatgaatgcttttctttaaaactatataattgaatgcctagagaaatgaaccttggctttagcagtactgaatggcaaaagtggaaagaaactcatttttcccttccttccttccctacttctctttctccttccatgctttccttccttctttccctgtttcttaaaaaatgcgatttgaatctagtttgggtaaagttgacctgtggggagttgaatgagaaaactgaaattaagtatttttcttctgagtattgtgttaatttgctccaaatgacagaattagcctaaatgttgagaagtgctaagtttcagcaaatgaaattgagcttaatttgtatttctttatgtttactgtgtatgtggtaaaattagataattaataaaggtttaaagggattctaactgataaactcaccgtttcaccttcttaaacctaagaagcataatttgcctaaattatgcaaaatgctaattaaagggtttaatttgctaatcatatccatttgattagaggcagatgctgattatctgcacaattctaaatggacctttcaaagatggctttcattatttaaaatcaacttgtcaaattaaggcataaacttaaggaataacaaataccagtagttaactatgtacttccagtgtaacgcagggcaagatgattcacaaatgctgtgcatcaaagacttggtgtattcaatgtcattatgaatttcagtagtcccaaagtttaagagttgaactttgtttggcttttttattgagcttattagattctgtagtcatacctttgttggtcctttgggtctttgactattttcctggctcttttttcttcctgctgtgagtcagacagcacaaagagcagaggcagtcttgtccatgtgcattcacaccatgcatagaaatggtcagaacatatcgggctgggcgcggtggctcacacgtgtaatcccagcacttcgggaggctgaggtgggcagttcacttgaggtcaggagtttgagaccagccttaacagcatggtgaaatcccgtctctactaaaaatacaaaaattagctagatgtggtggcgggcgcctgcaatcccagctactcgggaggctgaggcaagagaatcacttgaactcgagaggcggaggttgcagtaagctgagattgcgccactgcactccagcctgggtaacagcgagactctgtctcaaaaaaaaaaaaaaaaataagtaaataaaaaagaggaaaaaaaagaatatttaacagacaggtatgccacgctccctttataggttaccaaatcttcctcttacatatctaagagatgtggcaggaaacagacaacaggtatgggtcagtgttactgctgggaagcagggggaacatctcagttcaataactgaacaagaatttggatccaggcacccagcctttgtattctccctggcttgtctttttcttagagtgaagacagaaaactatttatagactggtcaagtgtgtctgtggctgatttagggcaaagactagggaaaccaaggcagaaactgcattacttttttctttttttttgagatggggtctcattctattgcccaggctggagtgcagtggtgcgatcatggcttcacctccccaggctcaggtgatccttccacctcagcctcttgagtagctgggactacaggcatgtgtcaccacgtgtggctaatttttgtactttttttttctgtagagatgggttttgccatgttgcctgggctggtctcaaactcctgggttcaagtgatctgcctgcctcggcctcccaaaatgttaggattgcaggtatgagccactgtgcctggccaaaactgcattacttctaatccaagttagaaacaaatggcccagtaacagaaaatgtttggggttttgcattcgagacctagggtgttaggatagggcatctgaggtatagacatatgaatcctgctttgacctgcatcaagatcaagggtagtaggatgagagcgtgctgtctaagcggggatacaccagagaggtcatatagcttgtgagtgaagagcataggctctggtgctgtaacacctgtagttgaatactggtgctgctatttactagttgtttttcttctctgacttagttttgtcatctgtaaaatagagtatataatagtattacctcataactttgggaggctttaataagttagtactttttctaaagtacttattaacagtgcctagcatatagtaagtacacaacaaatattaactattatttattattatttgttaccattctagcttttgtatgagatttgcaaatgataatgtatagggagaacactggatttcatcccccaatacccacttgagttctttaactgtgctacaaatatatgtagagtaataagttataagaacttcagtagtataaagctaatagaacttgaaatactagagtcttattaaaatgaataagcacagatttgagtccaaatcttcttttcatgcagtctgaggaggttagggatatgtgtaaattgttgctaaactgacagctattggaagaacctgatcatgagcactttttacatttgaattcaaagggtaaaaggggaggttcctttaaatttagttattttttggcttttagaggattagatttgtgataggataaggaataatagagtgctgttgattttatcctggctaagattaatagtctgtttgccacttctatgcctaaatgtctctagaatctgtccatctcctttcagtttcattgtcattattctagcttgggctaccatgatttcttatccaatccattcttttttttttttttttttttgacacggagtcttgctctgttgcccaggctggagtgtagtggtgcaatctcagctcactgcaacctcggcctcctgggttcaagtgattctcctgcctcagcctcccaagtagctgggactacaggcgcacaccaccatgcccagctcatttttgtagctttagtagagacagggtttcaccatgatggccaagctggtcttgaactcctgactttgtgatccccccacattggcctcccaaagtgctgggattacaggagtgagccaccgtgccggcctatccaatccattctttaccctgaagcaagagtgcagatatttacagatgtctatgctacagcccctccccaactcttcagcaatttcctattaatataatgttaatcttcaaaatttgtaataagttacctcaagctctcatccctgtttacctccctagcctcatctcttaccactaatctgtaaactctatggaccagccatgtgaacttcctttagttgtgaaaacatgttttttccccttgactttggatactcttccctacatttcgtctaattctgactcatctgtcatgtatcagcttaaacagttttctttctgggacatttccttaagtttagcgtagaaacccatcctctgtggcttttttttttttttttgagacagtttcgctcttgttgcccaggctggagtgcagtggtgcgatctcggctcactgaaacctctgccttctgtatgttcaagagattctcctccctcagcctcctgagtagctaggattacaggtgcctgccaccactcctggctaatgtttgtatttttagtagagatggggtttcaccatgttggtgaagctggtatcggattcctgacctcgtgatccacccgccttggcctcccaaagtgctggggttacaggcatgagccaccgcacccggcttcctctgtcagagcacttgtacttgagggttatcacccgcctgtcttgaaatgggctctaagtctcctgaaagcaaaggaccctgaatatggtgtttattacctaacacaatgtctagcctataggaggtacttaatgtatgttggttgaacaaaggagtaaataaatgaagtagctacctacagttgttccccagaagatacattacttaagcaccctagaaactgtttggccttttgaatgtttattgtaaagtttaaattctcagttgtttgttcttagtttgtgctaacagcttcataaaatgggtagatcaagcaatagtgtgcagttagcaaactgggtccacaaactcaagattcaaatcacttttggctaattgtgtacttatggacatcagattgctcttgtattaaaatttattaggcagactttgagtgggaaaataaaaatcttgatttggtagatgctggagaacagtaaaaaatagaaaaatttgcaggttggtgagatttcccagattcagtgtgtggtgtatctctaaagttcaaaatccttcaagaaggttgctggtgtatgctgggtgtcagaacaggagagatgtttttaacacctagcacagctgcaaactaggtggtctggaatttgcaagtacatctttcagttttatttcatcttgaagctttcatgtgggtttaacagttattcaatgtaattgaagttaatgtagctaaaattgcatattatttttgaagtgttaagaatgaaaataatttatggtctttaagaatgaatatgccaatatttcatattctgtattggcagtacagtaaaaattaattattttcactataagtattatataaataataaagatatttaggagggagtatatatgctaataggaaataaatgttttgcctcccaggagatcatcttagctggtacagtggattaaaaatggcctcaaattatttgatattttctcattgagaagtgggatctatgtcaccaccccttgaatctcagtagctttaaaaaattatggttaaatatacataatctttacattttaaactatttttaagtgtacagttctttgtcattaagtgtattcacattgttgtgcaaccatccccattcatctccagaactttttcatcttctccagctgaaactcattaccctttaaatactaactcctcattcttcccctgcccacctcttgatgtgagtgggttttggcaaatagagtatggatggcagcagtgacagagtaccagtgtctgggtacaggctttaagaaactgggggcttccactttctgtctctggtacacagtcttcaggagctctgggatgccattaagaattctaagtagacttgatggagaatctgttctgaaacctggcagtaactagtaattgccatgctggagaggcatgttgacattcccacctgagcccagccttttaagcatccctgtcacggtgccatacatgagagcagagccatctaagaacctccagattaatctgttcaccagctcagtacctctggtgacttcatttggtgccacatggagtagagacattgccagcagcaccctttctgaatacctgaccatcagaattgagagctgtaatacaatggctgttattttaaactgttaagttttgggatagtttgttatacagtgatagataattagaactggtagctagagcttctggcttcttgagtttgagctgaaaatagcaatcagtgtatcctaaatacctcaaaacaactgtactatgatttggaaagactatataaaatgtaatgaaagatactattaacaattaaataatatggaaaatgaaattccaataattagttgagtggagaagacaactctgaggagcccagattacttagaagggacagaaatgggaaaattgttgataaatgcttttcacctttcagaaatttgattggtgaatctgcttaaaagttagctgagaagtttgtggctttttcattttgaagaagagatttgccaggagtctgagaatcctttaaattcttccaaagacagctttattatgtttaggacagtggaaagtaatgtaataaggtataaggtatgagataatgaggttgatgtttttatgtggtgctcttagccccttagagtttgccaaaatttaaagcagaccaagtttaatgagtgtacttcatagtatagattgtggacagtcctttttgcttgctaaattcaatttagctcagatggtgaataccaatatgttcagagtactgtgtaggtgctatgggggatttaaaaacaccttcttaagtagaaagaggtataaataaatgaatgaaacaatcataagttactatagacaccacattatacaggcttcttaatttttgtatgccatttctaaatggttgcagatttttctccttttattttcagcatttaatgctttatattggctcttgatatatggagtttggattatggaaggtaagggggagattttaattcatatggaaatctatggaaattatttcttactgaaaaactgaaaatagataaaataaaaaaatacaatttcgtaagtccaggaaagcaggacagttgaggcctaataatacccttttgtgttggcagacagatttgctgctattatgacactttgcttaaggaatgggagtatcgtggatgaatacaaacctatacacagctgtttgtgtttgctgcacagctttctggataccttaagctgtatcacttttggattgtaatgattttactggaggcaagaaacaaagtgaacaagatacagcatcaaaattctcttttaagtttcccaaggctgctcttatttctctctacaaaatagaaataataattttgccctttttttgataacactagcagtagcaagcaaagtatagataagaacaagtgacatattttgagtaagtgatcaatgtcaggatctttacagagaacaataagatggatctaaaatgaatgaactgagtgttttctctttttttgcagttttggggggcatcgaatgaaaatggccacatttaggtagggtaggagaacaggctttggaaggagcgggtattttattacagtgtgaataaaataaatatttagaacattataagaatgatggctgacactgagagattcatgttaatgttataggtttctcaaggctgataggagctcttatattgtatttctaatgtagaggaatagaaggaaagctatggatggggtgcagaagaatggccctttggcagtgtaggtagtgctgcttcctgtcacactctagtgttacagcacttataaactggatgtgccttctgaggatactatcctttctgagtgcatcgtggcctcttcctatatttgaatccatgttttaagtgcagatgaagcgcttggacactgtggcactgtaagtaggattagaaccgtgacttaggatagggtataaccaaggggaggaagcttggtggaccttgaagtaagataaatgtgtgagtagcctctttctccttcttgatgcagggcacatggatgagatggttgggaaacactttttaagtccctgtgaatgtcaagaagtggcttgaaggggctttaatctctcaatcccttccccaccaaggtaccccagattaatgaacaattgataaaaagtgtgctttctatgcaaatgtgtcttttaagataagttccctagcaaaatcccactcctaagcacatcctatgtagaaattctggagccactgttgtcctttatattattttatagctaatatttaataaatgctttatgtgtgtccagcattgtgttgtatgttatggaagatttgcattaacatgtttatagttgaagagagcaggaaaagactgatttcaggaaacagaacaaggtaaaataatctggtgtcagaatatttaatatggtctacaagggttatagggggaaaaaaaagtgggcattgccatgggctggattaatgtaggaaggcgtcattgagctgacagctgtgaacagcatcttaaaagataaggcagaaaggaggtagcagagatactccaatggatggaatatcatgtgccaactgcaactttaaatgtctgaataattttctgaggaactaaaaatattgaattgggtcaacaaataggatacctttgtcaaagccatagagctgacttctaatattttcagttacaaatatatatatttgagcatcttttagaataaacacctcccttcccttcacaccaggtaaaaaaatagctggtattctaccatccatatgaatttgaaatatacgatagaaatataaatttagtaacacctgacttattaaaaattgccaaagatttgatttcctatggtctataagagaaaattgctacaaatcaatttattttttggaatttatttttccttactcttattgcttgaataaacgtggctgcatcagtggttcatgttgactcaaagcaagtttctccctttcctctccagctaaggaaagccatatttttttttgtactatgctactgttagctgcttggcttggaagacttcggttatcattatatctttcatgactcagaatctggctgcctctctttcaatgatcttgaaaatgtccaagatgctgcatgatttagaaatgtagaaccaagttaagttgaacagttttctactgggctacattgtaaaaatgggaaagggaaattacttcctttttttttttggaaaacacttgccagttggagcctcaaagaagattgagtttgagaggcctttaattgtgcaccaaaaggttattgcagaagataacataaaggagatgtcataaagaagaaaatttgaagctcagtaagagaaagctgtgtgaaaaaataggcattctgccaattaactgggtgcttgaaataaatagtttgtaattaaagaaacggttgcaaatttcaaagacttgatcagtttaacttagctcatagggaaaccggggtggtggtgggtacaaatttcagttgtgaaagcatgcttactctcattaaagttttgcttatcattcattaaatatttactgtttgtaaggtttagtaatataagatcagaaagtttgttaatctaatatttaatgttaaattattgaaataaaatttcaactacatttgggtaaaagtgaattatgatcttaggagttcagtcatgaactattgaccatctcagtagttagtatttcccaaactgggcaaagtatgggtgagagtgtgtagaggggagacccaagaaaacatagaaatggtccatcacccttgggtctactcatctactgaagaaccatgacacaattatatatgtaagcaattagtaataaaatatcatatgtttataagtataaaggagacatacaagaaaacattaaatgttcatctttccatacatgtctgtcttcatgttgcattagtttcaagtgaaatgtgtttttttatgttttattactatatactataccttttcatccaaagaagaaataagagattgtctcctttattggaagacatttttgctggatgtagaattctaggttggcatgtactttcttttagcacattaagatatatcactctgctgccttctggcttctcctcttgctgtggggaaatcagctgttagtctaactgtagctcatttgaaggtaagacagccaccctgctcttagtctccttttaagatattctatttaatttacttttgtttgatttaaatattctgtttgtctaggagtagaattctttttatttatcctgcttgagtttcaccagcgttcttgaatttgtagattggtgtcttatattaattctggaaaattctcagccattattgcttttaaacttccctctacctgttctttctcctctctgtctggtgtgttagtcaactgtattttaggtcttcttagtcattcacttttcatcctcaggttgtgtcttccttctttttgttctttctctgctgagttacagattattttttctgaactatttcccagtttgttatttctatattctgttttgtctgttctactcccattgaattttaaattttggctactgtaatttatttgttttttttttttcacatctgctatgttgctttttatggattcctattccttgcagatattttaatatttgcttttctttttcaaatttgttgtaggttgctttttaatctgtctgataattctaagagttaaaatctgtgtggtctgttcctgctatggtttgtgattgtctttcacccatgttgccttatttccttgcgtggttggttatctttaactggttattgccctcccacagccttttttcaggacattttcagggtgaatgtgctctcctctgagaggtactgtgtttgcttttgccaggtttctgagagtattactttaggggtattatgtcaggtattaagtcaaggacactttttaaaccgtatttaggattgtgtctctggcccatccacaccatatatactttgggtggccacagcttctcaaaaacttcattttcctacctttttcttttcctgctttgctcagtgacaagtcagcttgcccttcgttcttctgtggttaggagagagatggtgggtcaattctagttcactctttctctgaagatgttcttcgtttgggtctccagtttaatatagggagggcctcttgcaagagtcttccgcttggcaggccctaatccttgtgttttgctaccttgccccttgagactgaagatctgaagtatgaggagatggcatttactaatgtcctcagagcaaaaatggcattagttctcctgggtttgcctcaaaatttggccaacaagttcccttttaaactaaatattagtttaacagtatttttaaaatgctgttaagctaatatttttaagtgttttgtccatcatttttgttgttttcagtgagatgtagatctgaataacttaagaaatcagaaactgctaatagcacggagcccatctgctgctgtgctgttggtgatgttgcaaattgttcccctctccccttaacatattctgagcctcaagtcaagacagcttactgggctggagaggtgatggtctaaagaattataaagattttttaaaaatttaagttaaaatagcttcttaaattattatatcaaattaatagagaagtattatttctttaatttgtttaactgcccttgtgctcatctggagaaactgtcaggaaagatgatttttattaaaggcactgctgttacattcactcaggcatgattctgtcataacttcttggtatttcctttctatctttcttaattgcatgttttccctccatctctgtcacagtgccaattctaggactgccttattactgcttgttggtctagcaacttcttaactgttctttaattattagcggaattgaacattattttgtgtgtatgaatttttgtgccttttcgtgaattaatctgttttttatcttttgatgaatttattttattacatcctatcattaataatttttagtcttttggggtttcatcacacagaatatttatttttctcttattctaagcttttctgtatttcttcagtttgaatattgtcactttccatagtttgtgtatttcagtcagtaaacatttcatcaggtattgtggtaagaactgggaatataggctgtgtgcggtagctcgcgcctgtgatcccagcactttgggaggccaaggcaggaggattgtttgagctaaggggtttgagaccagcctgggtaacataatgagacccggtctctacagaaaattaaaaatcagctgggcatggtggcgcgttagcacgcctgtaatcccaggctatttgggaggctgaggcaggagaattgcttgagcttgggagatcaaggctgtagtgagctgttccagcctgagcagcagagtgagaccatatctcaaaaaaaaaaaaaaaaaaaaaaaaagaactgggaatataatcgttatgacacatttacctgtgcttaggttcatatgttagtgagggagatataaatgcttatagtattgtacataaataatataaaaaaaaactgtatcttcaagcagacaggtatgtaccagcatggaggtgggagtaactatgcctaaggaaatctggtgcaactttgcagaggtaacctgttagttgcatagaaatttgccagtagaaacacagggtatagaaagacatttcagatgtgggaaatatgtgtaaagtcatagaagtgaaagaaagacatggtgcgctataggaagtgcagataggttggtataattggagggcaaagtattttaggggaagaaaattgaaactagaaagagtttaaaggcctgggataaaaaggaactttgatggacacaaagagcctgtgtagtggggataatggagtaagtgagcaggaaggacatggagatgtggttggggaaaatgtgtgagggtaggggtgatgcgttgcttgtgaattgtgctgtgatcgtgggagtgggctgcagaagtggagggtgagtgggtcagaggatgctgacgactgtgaaactagtgttgactggatcatccatatgggtgtagcagtccatttggacagtggcaagaaagtggatgttgtgatgtcgacaagatttggatttggaccgtgcctgttccagttttagtactggaagtcccacatccttagaaacctctcattcctggacaaactgggatggttggtcaccataatgaggtgccagaaggatatgatgaacttgaggcattgaaacgtggagagcaataatctgtaagtggggagcagctggctagggtggaggaaaaaggagggaataaagttatgttaatttatgctagcacggtgttctcatgagatagcaaggaggtagaggtcttgattaaattacctattttttttcaaaaatatttgttttcttgtagaagagatgaaatatgctttagtataagtaaataatctttcctttttagtgttaattttactatattccaaatgtgcctatgctattaaaaaaacagtaataaagtaaccagacaattgatttttatattgattagcttgacagtattactgagacatcaacatactaattagaatgtcaggatattaaattattcattttctaacttttaatgttttggatgattataaatgacaaaaaaatttgtgagtgaagtaccatactatcctatcaattttagttaattaattcagccacagagtggtaattatttccttttttattttctatttttgtctctttgttaaagattttccaattaaaattttttcctattatatggctctcctttatacatttaaatgaagaaagtactttgtaagaactggattacagatagaaaaaaatgtttaaaactaacttattttaggttgataaatatttgggttatttatcactgtgtcagaaatacctccaaacctaaaacaacaattccaaaacctaacattaaaacttaaaatcaaaacttaattctaaaacttaaaacagtacccatcttattatatctcacactttcgagggttagggattcagaatgggcttacagggcaattgttctgttccacatagtattatatatgggctttcttagttgacaactagtctggtctaggatgtctaagacagctttactcacatgcttgtgcatatgtgaggacttctaaaaggctggactctgctggacgcctttccatgtgatccctcaaacgaggtggttggacttcttacttcatgatctaggactccaagtgaacaaggcagaatctgccagtcctctcaaaaaataggcctgggcctggcagggcatcactcgttcctgtcaaagtagtcacaggccaggccagattcaaggggagggcaaatagatcttagctctcaacggaggatgtgtcaaagactttgcagccatctttaatccccatgtactccagattgatgattacatcacagtgcatttgggaaacaaattgccctttataatcacagtatttgctaccaatatagaacctatatttatttgaaatgataataacagtattaaaaattatgatatttgctttcagcatttgatctattcacagttttaatttctttataaatgaaatgattcctaattgttttatatatatcatatatatatcatacatttattttagaaaagcggattcttttcctgggatatgctgtttagaccagtgatgtatgtcgaaccactaatggaccttaaaaaaaaacatacagctcagggcttcagtctgtaggtctgggtggcaccaggaatctgtaattttaaaaagcttcactggcaagtaatgtacatacttacttaatgaccagggtctaagaaagctctgtagattcaaatagaaactatccaaactatttataaatgtgattgagtattgttgattggaagcttatagaagcttaaatctctgggaagccttatttatatctttacttttgatgccagtgtactagactagtggttccaacatggcatccccaagatgatcatttgggaatgtgggaaagaaataaataatacaacatatatttttagtctcatccgttccacattttggggatgggtatggcatgttttaagtgcagaatgtacagtaatacatacatataatttataaataaatatacatatattggaagtatgtgctgaaaaaacttcattgatgacaatgtgtgatgcaaagatgaaggtcactgttccagtcagtttagtttatgcattggtaacgacccccaaacctcagtgacttatagaaaggtttgttccttgttcatattctgtgtcttcatgggccagctacaaccctgctgtgtgtcattttgtccctggactcaggcagatcgagtaggctctgtataccggaacttcaccagttgctgcggcaaaaggaggagagaactgggtaaaatacatgctcagaaagcttttgcttaggaataacacacgtcacttccactcacatttcactggccaaagcaagtcacttggctacactttagttcagcaggtagggggtgtataattctccctcagtgagggactcagtacagggtgaatagcgatacagtctacacagacatccactacccttctatttactgtgtagagtatttgcctctctagagctgctccttaatctgctttcaggatttcaacagagtgaaattgcctctctcagttcctggtttgatgaagaatataaaaaagaaaaagacacacagccaaaatccttaattctgttagcaaggcagcatataaaacaacataattttggaatatggaaatataactttgccaaaacagttaaaacccagtgtaatttttacttgataaaaaactataccgttataccatgtgctaccatttgaaacattcaggtactgactgttgagtgggtggatatgaataatagggattgagatgtggggaattatgagtagtagtggcaagagcagaacttcaaagctagaatgttcagagtctctgttgattggacattaatcagagtgaaggttgagcatctctaaaatagtaatgtaagtcactcaaaaaatgtgtgtttcatgttgagccatttgtttatacacctctttttaggaggatgtttactttgtgaagcatactacaccttgattataagatgttgcagtgataacctagctggcttttatcagttattttgaattcccctatacaccaagacctgtgttagtttaatgaaatgacaagtttatagaaactgcattagttgcagtaaacatttcactttattacttgaggaaaaagcctgaaatacagaaactaatcaaaatgtaaattacaggtagtaacaacaagtgtttaccatgtactaagggtgtgctgtatgttaggcctattgtacacactttacatactttatttaatcccaagaaaagctacatgagataggtatgattttcttcattttatccctgaagaaactaaggtgtaaagaggttaactaacctgtttaagattcaaagacaggtttctatgattttgaaaactattctctctactactttactctgcttttataattgttccactctatctgtttttacttgtattctttgttagtagaagtaggaagccatttaatcttgtcttgctctttcagagaatgagtattttttttaggtatgcagcaggtaatctcatttaggagaacctaaataaatgaaatatccttatattttgtccaatagtttttaaggagaaagcaagagtaaagagaatattcaggattattttaggatttcaaaataatgaagttaatagcagtttatactaattatttaatagtaaagtttctgacagtcatcctacatttttcaatgagaattgtcttgtattttccatttccattttggttataactaaatagataaatgaagatttagaatttgtttgacaaatggatgtattttttaattcatcaaagaaaaccagaatatttactcataggccatgaaacaggaagtgacatgaaatttagatcgaagtgcatgatttagagtgtgtttgcttactttgggtgaaaagtttagaaacacattgaattccttagaattctatctatagctttttttttttttttttttgagatggagtctcaccctgccacctgcgctggagtgcagtggtgcgatctcagctcactgcaacctttgcctgcctcctaggttcaagctattttcctgcctcagcctcctgagtagctgggattacagcgtgggccaccatgcccggctaatttttgtatttttagtaaagatggggtttcaccatgttggccaggctgggctcaaactcctgacctcaggtgatctgcccacctcagcctcccaaagtgctgggatttcaggcatgagtgactgcacccagcccagaattttatctataacttctaatctgagcaagactagatagcttttattcttctttgggtgggggtagatttcaatgagaagaaatattgcattaaactctaatttttatttaagttcttgaggtttgtttttttttttttttcaaaattatatcttgtatatttccaaggcagaagactatttggagaagtaaagtctgttgtagctaaagtattctgttgtgtggcagttgaactgatgtgtgcttccctgacatttacttggtaagtagttaattgcttaccaagttagaaataactgtggtatcagtaatacaaatacttgaatttagggaaaggtgagatactatattatgctaggtgaagtattagtggtacttagttattaatgtgggatttgtttagttagaacctaaaacaatattaggacaaacatctgtatgttcaaagatactagtttctttattgctgggtaaaaggtgattataaaaggatcatgacaggttaacacatttggcttcaatttcagttttgccagatctaggcaagatttatttgggcaacaaacaatacatgtaatcaattataattattcttattaatggtggggaacacagagatgtatattaaaattttatttaatttcagataaatgtttactgggaaaatttgaaatatatttttatatttaggttggatgcttacttaaaaagcaatgaaagagcatcgtgaagacatgaagatttcttctcctttcaccctatctccccaatcagtttcttccttcattaattgctgtttgagaattataacttggctctaaaacttaaaatagctacttcctctcagatattttctgcattgtgtgtctggttgcctatttgagtttcagagaatttcccttatggaatgcaaagtgaaaggtaaatagtcaattaagtagaaaagttactgtcaacagagatatatgtaaacatagcaaatacgaaagcaaaataatctggctttagctcttagggaaatatttgctattgctaaacctcaatttacatactctacaatgagtgttgattatctgtaatttgtgctctgaccctttaaaatttttacttataaaacttctcatggcatctagttgtattacatttttagtttctgtatctttatcttgtccatcaccaaagaggaattgaggtgaaagtttccagttgatgaatttgtcttccattgcttttaatgttacatgtttgtttagctttcctgcaaagtagtatctgtttatttgtttggagaccacatggcctagtggaccttagcattggatagactttggttggaaatccagtttggtttctactcatattaattagctataaaactaggataatatccagcttatagggttattagtaggattaagtgagatagtataagtaaaatagcatagtaactagtagatagtacacatggatttcagtcatcatcaacttttgaataatctactagattgacacaactaaacttcatcctctgctgtatttcaactttcatataataaatggtgagtgaggtattaagcccagcatctgatgcgctccctcctctcacctcccaccctccaaaaggcccagtgtgtgtttttctccaccaagtgtccatatgtttttatcattcagctcccacttataaatgagaacatgtggtatttggttttctgttgctgtgttagtttgttaaggataatggcctctagctccatccatgtccctgcaaaggacatgagctcattccttcttaaggctgcatagtattccgtggtgtatatgtaccacattttctttatccagtgtatcattaatcggcatttgggttgattccatgtctttgctattgtgaatagtgctgcagtgaacatatgtgtgcatgtatctttataataaaaaaataaaatgatttatattcctttgggtatatacccggtaatgggattgctggcttcaatgatatttctgcctctaggtctttgaggaatccccacactgtcttccacaatggttgaactaatttactcttccaccagcagtgtaaaagcattcctttttctccacaaccttgccagcatctgttgttttttgactttttagtagtagccattctgactggtgtgagatggtacctcattgtggttttgatttgcatttgtctaatgatcactgacattgttttttttttcatgtgtttgttggccgcatgtatgtcttcttttgagaagggtctgttcgtgtcctttgtccactttttaatgtttttttttttcttgtaaatttgagttccttatagatactggatattagacctttgtcagatgtatagattgcaaaaattttctcccattctttagattgtctgtttactctgttgatagattcttttgctgtgcagaagctctttagtttaattggatcccatgtgtcaatttttgcttttgtttcaattgtttttggtgttttcatcatgaaatctttgcctgtgcttatgtcctgattggtaatgccaattctggggttttcatagttttaggttttacatttaagtatttaatccatcttgagttgatttttgtatatggtataaggacagggtccagtttcgattttctatgtatggctagccagttctcacagcaccatttattatacagggaaatctttccctgttgcttgtttttgttaggtttgttgatgatcaagtgttgtaggcatgcagtcttacttctggtttctctaatctgttccattggtctatgtgcctgtttttataccagtgccatgctcttttggttactgtagccctgtagtatagtttgaaatagggtagtgtgatgccaccagctttgttctttttgcttagggttgtcttggttatttgggctcctttttggttccatatgaattttaaaatagttttaaaaaaattctgtgaagaacgtcagtggtagtttgatgggattagcactgaatctataaattgcatcagacagtatggacattttcatgatactgattctttctatccatgagcatggaatatttttccatttgtttgtgtcatctctgatttctttgaacagtggtttgtagatctccttgaagaggtcctttacttcctttgttagctgtattcctaggaattttattctttttgtggcaattgtaaatgggattgccttcttgatttggctgttggcttggctattgttggtgtataggaatgctatttatttatttatttatttatttatttattttttttgagacggagtttcgctctgtcgcccaggctggagtgcagtggcgcgatctcgactcactgcaagctccgcctcccgggttcacgccattctcctgcctcagcctcccgtgtagctgggactacaggcgcgcgccaccatgcccggctaatttttgtatttttagtagagacggggtttcaccatgttagccaggatggtctcgatctcctgacctcgtgatccgcccgtctcggcctcccaaagtgctgggattacaggcgtgagccaccgcgcccggccttatttatttattttttgagacagagtcttgctctgtcgcccaggctggactgcagtggcgcgatctcagctcactacaacctccacctcccaggttcaagtgatcttcctgcctcagcccactgagtagctgggattacaggtgtgtgccaccatgtccggctaatttttgtatttttagcagagacggggtttcgccgtgttgggcagtcatgaactcctgacctgaggtggttcacctgcctcagcctcccaaattgctggtattacaggtatgagccacctcactcagctggaatgctagtgatttttgcatgttagtttagtatcttgagactttgctgaagttgcttattagcttaagaagcttttgggctgagacaatggggttttctagatataggatgatgtcatctgtaaacaaagatagtttgactttctctcctcctatttgaatactctttatttttttctcttgcctgattgccttagcaggaactttcaagactatgttgaataggggtggtgagaaagggcaagcttgtcttgtgcgggttttcagggggaatgtttccagcttttgcccattcagtatgatattggctgtgggtttgtcatatatggctcttattattttgaggtatgttccttcaatacccagtttattgagagtttttaacatgaagggatgttgaattttattgaaggctttttctgcatctattgagataatcatgtggtttttatctttagttctgtttatgtgatgaatcacatttattgatttgtgtatgttgaaccaaccttgcatcctggatatgaagccaagttgatcgtggtggataagctttttgatgtgctgctggattcggtttacaagtattttgttgaggatttttgcatcagtgttcatcaaggatattggcctgatgttttccttttttttgttgtatctccgccagattttggtataaggatgatgctgacccttcctctgttgcccagtctagagggtagtggtgtgatcatagttcactgtagccttaaactcctgggctcaagagatcttcccgcctcagcctttttttttttttttttaaagtagctgtgtgtaatggtgtgtgtctgtagtcctatctcagctgggactactaggtactcaccatcacacccagctaattaaaaaaaattttttttagtttgggtataatggtttatgcctgtaatcttagcctattgggaggccaaggtgggagaatcacttgattctagggatttgagactaggctgggtaacatagtaagaccgtgtctctataaaaaatttaaaaaatggccaggcatggtggctcacatctgtaattctaacactttgagagggcaagggagtaggatcccttgagcccaggagttcaagaccagcctgagcaacatagggagatcccatctctataagaaaaaatataatattaaaacaatttaagaataattagctgggcatggtggtttgtgcctgtagtcccaattactcagaaagttcaattactcagtgatccgtgatcataccattgcattccagcctgggtgaacaaacaagaccctgttagagatgggggtctcacttagtcgcccaggctagtctcaaactcctggcctcaagcgatccaaccacctcagcctcccaagtagctgggattacagatgccaactcccatgcctggccatttgtatattttaaccattctaattgtcatgtagtggtatgtcattgaggtttccattatggtttcaaaccctgatgactaaggaggttgagcatcttttaatacattttttggctctttgagttttctcatttgtaaagtgcctgttaatgtcttttgctaatttttctattggattgactcttttttttgttatttctgttctggctgttcttggccctttgcatgttcatgtacattttagaaccagaacgtccacacacagaggcatacacaaaagctattacgattttatttgggattgtattgaatctataggttaatttgaagagatttgaaacatttacaatattaagttttctggttgatgtttagggtatctctgttaattaatttttctccagtttctctaagattttatatttttgttggtgaaggccttgcacatattttgttagatttattcctagatccttgatagttttaattctgttgtaaattgtagcttaaaaaattcccttactgaattttgttgctggcatatagaaatacaattagtttttctatattttttattttttgagaccgagtctcgccttgtcgcccaggctggagtgcagtggcacaatctggctcaccgcaacctccaccttccaggttcaagcaattcttcttccccaccctcctgagtagctgggattacaggcgtgcaccaccatgcccagctaatttttttttttttttttggtatctttagtagagatggggtttcaccatgttggccaggctggtctcaaactcctgacctcatgatccacccgcctcagcctcctgaagtgctgggattacaggtgtgagtcaccgcaccctgccggtttttctatatttgaatccagaaacctgactcaattaggccaatagttttaataatttgtcgtggatacttctggattttctaagtatactaaatcatataatctgcaaatagagttttagttcttctttttcaatcttgatacttttttgttcttacctatattgtttttattcatggagtctcatttcctggtgtgctttgttactgttgtatgctggagattgtgtttcgaaagttatgtgtggactatattgaagcttaggaggattatatctttctggaagggttttcatttgttttttttttttcattggcctggggtcattgctggtccaggctaattttaatttaaatctgggatctgagatctcagaatcactagataagttgaaaatgggttgtagatccatgtgaaggctgataaggttctggttcatcctcaagtaattgttcacagctacaggaatttcaggggtttcttcctgactccattgagttttaaatttctgtgcctaaattttttttgtctatttctagaaatttttttttctttttcctctttttccttatataggcctaatcatctctgaaatgtcatttcttacattcatctaaatgtgtgtttggaacctgtttaataaaacacaggtttcatttagtgatataaaacaacacatcacaaaggttttgtgcacattgcttgattttaggtcttagggctggatgtttgtatgttcctgtaagggctcaacgggctcagaaatgtcatttcttagattctacaaactgtgtgtttggaacctttttaatgaaaacccaggttccattcagtgatgtaaaacagcacatcagaaagctttttcttcttcttcttcttttttttttttttgataatggtttgctgtgtcacccagactggagtgcagtaatgtgatcatggcttactgcagcctctaactcctgggctcaagcaatcctcccaccttagcctcccaagtagctgagataacaagtgtataccaccatacctggctaatgttttaatttttttttttgtagagatggggtctcaccgtgttgcccaggctggtctcaaactcctggattcaagtgatcctcccgccttggcctccaaaagtgctgggattatagacgtgagccaccgtgcccagccttttgcttttaaaaaaaaaatcactttttatagtttccacttcatacagattgtgcttgtcttttatttctgtacacatggtagcatagttattatctgtaaactttgtgaattcttccctgttgtttttgttcgtgaagtatagtttttttctataccttgttataaaatacaacgtgcttgacattgtatttggaaatttatttgtaggaatactttgaggtgtaatgtgaaggttcctccagagaggatttgagtttgcttttgcgaggtgcctgggcatttgaatcaggtaccgccttaaaacaagttcaaggcttgggattccctgatatcctacatcatttgagcaggaaggtctctcgtcagatatcccactttgtgtgggcctgactttgtatattaactttctgtgctgtaaagatgttttaaaaattttatcagtgttttgttttgttttgttttctctaggaggttgacccaaataatatagcctgttttactgaaacagcaagttctactgcagtttgtttaactagatacatgttggacatttagtttttttctttattattataaataacactgtaataaagaaacgtttttatttgtgtgcttgtcctgttatttacttgtgattaatctgaaaataaaatagttacaatctgcatttttaaaggctatttgatatgtattatcaaagtatggtacacaaagattgtcctaacactgtgtattctaaatctttttaacttttaccattttgatagatggaaaatagtacacattattattttaatttagcatttattatttttacttatataactattggctgttcatgttttactacttttgggttatgaaagcttacatactgccaactaggggcttactgaggctaactcacacatcagatgatgtaaatatttccctcagtttgtcacttatatttcatcttcatttacaaaaatatatatatgttttggtatagaagtttaacgcttgtactaatcagatctatcaattttttataaagccataatcagtctgagataataaatttatagttgttcctagaaaaactagtgttttaagtttggaattgtcttatgtggctagaaaattgagaaatagtcaaaccactctaacctcaattaggatattttaatatattaacataactcaaattaggataatgctcatttttagtctatattaacctgagtttttatgataagttttttcctttttctcattaaaatattttctctttgtctgctactgttcttttgatgtataccttcagaaattggcagggttgaaatttgaaagaatattcaatttaggtttttttctgtattttgccttcactaatgatagtgattcagatatcatgttagaaatgatttgagatatcaaggttttaaaatttttaataaaagtaaacagtattcattaaaacaggaaatcattttattgaaactgaatgaggacttcaaatttttgtaacagcttaaaatatgtttttttagataagtgatgaagagaagactcttcgagaacaggagattgttgcctcatcaccaagtttaagtggacttaagttggggttcgagtccatttataaggtatgtaaacatgtaaaatacttcctaggttttgttaaatatgtcgcattgagctttatatacatatttaattaatccatttttatagcctctcatcatcacagctactctgtctcctgcacagatactgtcctcattgcactaatggtgtgccaatgttctctcctgggctgtctccttccacggacgcattcccaaccctgcttgggctctgacctcccattacaggctgttttcctaatggaataccctccttgcattgtttgggttcttacaccctgcactgggctatcccctgccaggaaaccctcatcacccatttggcccaacactctgtttggattgctgccttgcgtggaagccccctttcgcttctcttgacctctgacatcgtggtgtcttgcctcatggtctctctgtgattccactgggctctgacattgtaagcctacgttttttcctatgggaatgccctccttaacctactcagattccatcatcctgtgcttggccacctcagtttcccctccccactcagttcagataactacgtcacatgaacccttccagaaggggaagagggaagagtttaaattcattttacaatttgataactgcaaccccacaatttcctttgaaaagaatgtgctaattattatgagtgagtgccagtagtttaaagtcctgccccattccagcttcttcgtttcgactgttgggccatcattcagtcagcctttcaagcctagagtgtggtgatcaatatttatttctcttacaccacacatttccagttactctgccttcacatcatcttttgcttctacttgggcatttttgtttccactgtgaccaccttaataagctagaatcatgaaatactatggctaaagaatccctaagggtcagttagcctgtgtcttcctcccctctctcagctttacagatctggctgctgagatttagaggcattcattaaattcaccaaataagtctagtcagtatcagagcttggactagaactcatgtttcttccctatattattgcagtaaaccctcttacctgctcatctgatatgtcctatgtaagctacctatttggtgcagtatcacacaatttaccctgtaggtctgtttgactttccgtgtgtgcccatgagggcagggactgtgttgcagttgtagaaataggtaaattaattgaaagttgttaaaaagcacatgatctgtttatagtgtgagatgtcgttggatatacagaaaattgtatgcatttatatttaattcttccttaaaacttgaatgaataggcaatttgggaatcatttttcacctaattttttaacctcgttttttaaaaaagaaaaattctattggagagtaagaatgatttttacagtttactaatatcatacttcgctcatctcttagaattttaagattgttcatagggtttaaaaatctaagatttttaaaaataaattcttggggcaaatacttcttttaatagcaaaactgaatgcttattatttccatttcttagtactgagattagctttttcagtatatttctctggagtgagaatggaaacatacatgaagaaattggaatttacttacaagtaattttcagctctgaatatgttgtttacaaattaggattctctctgatgcagaatacaaagtgggatatgtgaggtgaatgcaacatgtgtagaagtcttgagttaagagtttgaaatcctggggattatgttttgtaaattcagaggttaaggaataaaagtaagcattccaacttggccttttagtgttactatttttcaaaacatcaactctgaaacgaacatatttttgtactgccactgtttgctaatgctgttgagttttaaggaggataaattaatcattttgatattcttttggctctgctaggactaatgaatttctttgtttatactttatacatatgaagacttaggatttcttaatgacaggtgctgacttattttgcctgttttactcttaattcagatcccttttgctgatgctctggatttgtttcgaggaaggaaagtctatttggaagatggctttgcttacgtaccacttaaggacattgtggcaatcatcctgaatgaatttagagccaaactgtccaaggctttggcagtgagtattttacttgatttctgtatctgacatgttcacactttcagttatatacccctggtagttttattctgtgtttctctaggaaataagttaattcagttttcataatgatattcagattacatatgatgttgtactgttaatcccaaaattcctaggtttttatttgttactatccatagttggtttttaagttttttttcttgatcctactaataccaatgctgagtgattaattttgtgagtaacctctgtgggtttcttcatggtcatgtcttttttccttagaaatagacttcgtatatggctcttaacaattagtgtggcctgtggtagatataactcctagatttctgttctgaattagtatttggtatcagtagaagacaatatagaagaaaatcttaagtactaacactgtgatatgctagtgctgcaatgagtagctccatactgggtgaatttggaggtagctgtgttgaacaaatgacatgatcagtgatttttaagtagtttgttggaagtgtgactcttaagtggtgatatcttaaaactatacacatttttatatgtaaaacacatattttacagttgttgtctcttaatctgagtcagtttttaatactttttttgtacctaatgcagaagaagacttcaaaggtttgtgacatggctgttttaaactgtactgattatagtgtaagcatatgccaagctttccttctcagttaaaaattgtagtattttctgatataaataaatttttattgactctctggggttacctaaatatgtataatttagctatgtcagcacttgggaagactaaaatactaactctgtgtttattaaatgaaggaatttatgagaacacctagcataacaggtatttagtaactgttaatattctttctccattcctaatcctgttatttctttatcctcatgaaagttgatgcttttaaattttttctttacttgtctgtcactaccctagattatattctagttacagctaagaatagtgtctttcaccactgtggaagacactgatacttgtctactgtttggccattgctcttttattattcttagttttattcacccatattctctctgttgacattttagaccacacttctttgtgtgaaatagacaaatattttccagcatattggatagttttagctgtcatctattaaatgctggtggtggaccccagtctccatgacaaccaaaaatatcaccgtgcatttcagaaaacttctggcatgttaatgctactattaatctgatcatagtcatttccttcttaccaaatttttaatttatgcctgtgacaatgtcattgtggctaaaaagtatgagttctttgggggctcctgaaaaaagtttttcttgctaaaaaaaaaaaaaaaaaaaggcatgtgggatgaagtagtctttttttcccccctctggatattgttgtaactgaatgtgatgcctggaagagctacagccatctagagatgaggcaggtaacttcgggacaacccaatttgctgcatagacatgtagaaagatggaaagaatctgagtccttgttgctgtcgttgagttgctgaattaacctattctggaaccaccaaactttttattacatgggataatgaagttttaatttttaaaggcactaacttaggtactcatatttgagtggaattctctttctctagtagcagaaagcatcctggtacctagatcagtgtctgcgttagttagtattttcttttctagttgcaggtaacagcctatgctacattaaccaataaatagaatctgttagctcataaaagtgagaagtctagattatagtatggacttcagacatagcttgcccaatgtttcacccctttctctgaatatgtctttacccttatgtgtatgccttatcctcagtctggctttctgatggttgcaaaaatagttaccatgggatcaggctttatttctatatagcatactatctgaaagagtttctttgtccctgggcagaagtttgaaatcaaggtgtcggcatggccatgcttcctctgaaggtgctggggaaagatctattccacatctgtcttctggcttctggtagttctttgacttgtggcaacataactcaagtcttcacatggcattcaccctgcatgtcccaaattctgctttttctaaggatatcagtcatattggggtatcatttttctaaggatatcagtcacctctcaactccagtgtgacctcattgtaactaagtacatctgcaacaatcctatttctaaataaggtcacattctgaggtactgggggttagtacctcaacatatgattttcttgggacagagtttaacccatatcacatgtctatcactaaagcagctattgtggtttaagggatagcctagcctaagatcatgtgtctgcccctttagatggggtatcatgggagctgagagtcagtgtgttcctgaaaccacaatatcccaaacaaaaatggatgattgttaggaatggggagaggggagaatgaagatggggaggcagacaacaattgtctactacctagaaaagacactgaatatgaattaaatgtacaaagtttttcactttgtaatttctttcaagccaagctgcccagtgcccaaaaacctaactatgaaaatgcatctgaaattcttttacttttgggtttaaagctacttctgattttgtgtattgcaaagtttaaataaatttttaataagttttgactgttttataaatttgccttgaaagcaactttaaaaatgtaaaaaaaattttacatttgccacacatttttattttagataagtcaagatattctatgtatatttgtgatttatcatcccaatattccagtgtagaaagaaggatatgtggcagatttttgcaaaattttacaatttttttctactttctgggtagaagtgggggatctatactgagagaaaagacagaacttgggttcctaagtttgtaataaattcatttcagccaactgcacctaagctttctaccttgttgttaagaaataagagtatttatgaactttgaattccattcttcttcacttctttctactcattcttccccttccaaacatactttttaaaaaattaatactttaaaaaaatttgaaatatcacagacttacagaaaattaagtagaaaatagcaactttttctttaaaccatttgagaataagttcccagcctgatgtcttggcacccccaatacttgttagtgtttatttccttcaaacagaacattttcctgcataaccacaattcaacatccaaataagaaaattaatgtttataagttactaccatctaacctccagaccccattcaagtttcaccagttttctcaatcacattccacaggcaattttaattcacatgtattatttagttgtcacgtctctttaatctccttcagtctgcaatagattcttagtttctcttagattttcatggactttgttacttttgaagattatcagcagttattttgtatctctcagtttgggtttatctgatgtttctgcctagattcaagttagacatttcaagtagtactgtaacagaagttatgctatgttcttttcattgcattctatcagattacatgattttgattcagcccaattctgattgactttatcaaaatttatccattctattgttgataggcatttggcttttgttttctttttttttttttggttatcacaaatactgctgctctgaacattgtagcacatattttggaaaacatatttctgttggttatgtgtttaggaatggaattgtagggtattgagtatatctgtgtacagctttaatggatttagatttactttaaatggatttattctggctgagtggggtggctcacacctgtaaccctcgtcctttgggaggaggaggtgggaggattgcttgagctcaggagtttgagaccagcctgggcaacatagtgagaatcagtctctactaaaaacaacaacaacaacaacagcaacaacaacaacaacaacaaaatagccagtcgtggtggcatgtgcccgtagtcccagctacttgggaggctggggtggggggatcacttgagcctgggagatcaaggctgcaatgagctataatcatgccattgcaccccagcttgggcgacagagtgataccctgtctcaaaaaaaaaaaaaaaaaaaaaagaacgaaagaaagaaagaaagaaaaggatttgtcctgattacaggtgggttgtggagagttctggccttggtgtcttggatttaatagaagacagacagtgacttgctttctcctgggtggttcagggccgagcctggttgagaggaggtccagagaacactttttcttatgtaggagagtggtgggagttgttgcctgggagcctgtcctgacagctgtggaaaggagcaggagggaagcgaaggagttcatttagggctgtggcgaagtagaaatctaaacctattgctatggtctctttattactgtcctttccattgaggaaggttttgaccttggagtatgtaattgaaaactttcagctttataaatggaaatattcttgtaggataagaaaaagtaccctaaagtagattttttgaaaggtattttgatgagtggtagaggatgaaataaatggttctgggggaagttgtaaattgatgagagttttaccccaggtgacaactgaaagcttattcttaacctgtgaccatatgacttttataatatgactatctagcttttgaacatggtttaggactgataaaaaattgacattactttttcctttgataggaactctgtggcccagaaccttccctttaagtcccaagattgtgctaagtatatctcctttgtgttcccacagcattctgcacacgaccaaattacggtgaaattattctcattatgtgttttcctcctcaattaaaatgtaagttctttgagagtgaggaatttctcttaattcaaatttttatctggtatagcatgtggcacatagggttagtggtcagtaaaattttattgaactgacagataccaaataatgatataaacttgcttttgttcacagtttactgtttatacatactgttaatcccactataagtcactgagagagaaaggggttataatgtgcattatatggatgaggaaaatgcagcacagagaggccaaagtaatttgtctaagattatgttggctaataattgctggagccctgacttgatctcaggttttctgattgtaattcttagggtcttttgatggtaactgtgcctttgtcaggagttgtataaccaggtgatttaggtcttcaaactctgataaaatattcaaaggtaagtatattaaggtccagtcacagagcaggcccaaggggtgaatttggagctacggtagaatagattgataaccagttagggaaaagaatgagggaaagatagattttttttgcttcatatggcaattttagaagctatagccagttcttttatttaatggtttatttttaaataactttttatttgttcatccatgcataggtttgggtactagagatactacttaacaaattagatgagatttcttctcttacaaagcttatattctagtgggagacagacaattactgaagaaataaacaataacaatattgtaaatgacatgaaggagccagctgaacaaatatagaggaaactgcattccaggcaggaaaagtcactaatgcaaaggcccccaaagggaggaatcttggcctttttttttagaatcaaaaaggccagtgtagctagagcatagtgagctacggtagagtgctaccatgtgaggctgcaatggctaggtgtagactctgtgagactttgaggtagagtcccagggtaaagagtttgatttttttttagcctaatgtagttgaaagacattggatgattttgaataagtgagtgatatgatctgatttatgttttaaatagatgactgtggctgctgcttgaaagccattttggaggataaaaaaggaatggaagcgggaggactagtctggaagttttcacattaatctagatagtggcttgaaatggattggttgtggtgatatgactgacagaagtcagtggatttcagttagtttttaaagtaatattgacatggtggattggttgtgagagaaagagaagaatcagcataatgatgatgatgatgagagcttaagcatagtgaaaatttaatatttgccaagtgctattctaaatgctttatatgaattaatgcatttagtctttatggtaaccctataaggcaggtaccattatcactctctgaggcttgtagtatctttatacaggtagtgaggagcagaagcaggatttgaatccatacagtctggcatcaaggtctatgttcttgaccattatattacactgcctagaattttggcttgaataatttattagggggtgatgcctttgccaagatgtagaagactccgagaaaaatatgtaaaataaaataaagagttctattctgaccacgttaagtagaaggtgcttattggttacacaaatggagatggcaagtttgaagttggatttgagtgtctaaatttttggggaggagaatgtgcagccatgagactccaggaagagtgtgggatgtcagtggagaagagagggggcccacagctgagcttggtttccatacacttccacttgatttcattaagcagagaacatacttcatttgttgttagaaaatggggcagatccttaaattggagctggatttctttaaggcaaaaatctctttctcctcacacagtgtgactatttatttttatttttattttttatttttagacagggtctctactctgtcacccaggctggagtgcagtggtgcaattacaactcaccatggccttgacctcccaggctcaagcagtccgcctgccttagcctcctaagtagctggagccacaggcctgtgccaacagtgcctggctaagtttttattaataaaagtttatgtagagttggggatatccctatgttgcctgggttggtctagaactcctgtgttcaagtgatccttctacctgagcctcctaaagttctggaattacaggcatgagtcaccatgcctggccttaatttcactttctatttgtgagactcatctttagaaggtactggtaaaacgttaaagaaaccagacttccaaaaaatgtatttatacacatcttatttagatacagaaaaaaggactgagaagttcccaggaagataattgaaaggcaggtaagtggctcttacttggagtcacagagaaaagcaaggattttcttttttgaaaaggatttcctttttcacatttagaaagtaccagttgggtctgtggctcactaattatttgttcgtttggaaaaatatgctttgtaggcacttgatcaggtaatttttatttctaaagagtttggaatcctcttaaatcttgtatcctctttttaaaagtagtgttcaattttcttccttaaactgtgattaaatataattaattttcttgaatggttacttagttgggaatcatataggagttttcttactatttgtgtacaactagctgatttcttgggttctggttaacatgtctttttaaatatactgatcatttaatgccattttaaagtgggtcactgtgaacttgtcagtgctgcagcaaatccatcaatatgcaagtagcatatcacgatatgcaagcataacatgctttcacttccaccattactgtcaggcaccagttcatttggtctcccttgctgctgatctgtgggaaacaaaacgttgcagttgaaagccatgagactattaggatggtgcaaaagtaatgtggtttttttctttacttttaatggcaaagactgcaattacttttgcgccaacctaataacagaaaaaaaatcatttttcgggggaaaataagcatatgctctttctagtttgacaggtttgttgactgaggatgctcagctgaacttgattgttgttctatttgtgagatactggtttgttaacctttttctaagatgcagtttacaatctgttgtctattcaacacatatttctttttttttaacttttaggtttgggggtacatgcgaaggtttgttacataggtaaactcatgtcatgggggcttgttgtacagattatttcatcacccaggtattaaactcagtacccaatagttaccttttctgctcctctccttcctcccaacctccaccctcaggtagaccccagtgtctgttgttcttttctgtgtgtgcaagagttctcatcatttagctctcactaagtgagaacatgtggtattaggttttctattcttgggttagtttgctagttagtagcctcaggctccatccatgttcccacaaaagacatgatctcattcttttttatggctacatagtattccataatgtatgtgtaccacactttctttatctagtctgtcactgaaggacatttaggttgattccatgtctttgctattgtaaatggtgctgcaatgaacattggtgtacatatgtcttgatggtagaatgatttatattcctctgggtatatacccagtaacgggattgcaaggttgaatgatagttctgcttttagctctttgaggaatcagtatactgctttccacattggttgaactaatttacactccctccaacagtgtataagtgttccctcctcttcgcaacttcatcagcatctgttattttttgacttcttagtaatagccattctgactggtatgagatggtatctcattgtggttttgatttgcatttctctaatgatcaattgatactgaacttttgttcatatgcttcttggccacatgtatgtcctctttagagaagtgtctgttcatgtcctttgcccactttttaatggggttgtttatctcttgtatatttaaattccttatagatgttgaatattagacctttgtcagatgcatagtttgcaagtattttcttccattctgtaggttgtctgtgtactctgttgataatttcttttgctgtgcagaagctgttaagtttagttagatcccatttgccaatttttgcttttggtgtctttgtcatgaaatttttgcccattcctatgtccagatggtattgcctaagttgtcttccagggttttcattgctttggattttacatttaagtctttaatccattttgagttgatttttatatatggtataaggaaaagtccagcttcaatcttctgcatatggctagccagttatccagcaccatttattgaataggggttcttttccccattgcttgtttttgtcagctttgttgaagatcatatggttgtaggtgtgtgggcttattgctgggctctctgttctgttccattggtctatgtgcttgtttttgtacctgtaccatgctgttttggttactgtatcctgtgctgtagtttgaaattggtagtgtgatgcctcaagcgttgttctttctgcttaggattgccttggctattcggactcttttttagtttcatatgaactttaaaatagtttttatttatttattttttagttctgtgaagaatgtcattgatagtttgataggaataggactgaattatataaattgctttgggcagtatgaccattttaatgatattgacttttcctgtccatgagcatgggatgtttttccatttatttgtgtatctctgatttctttgagcagtattttgtaattcttattgttgcgatctttcacctccctggttagctgtattcctaggtattttattctttttgtggcaattgtgaatgggattgccttgttgatttggctctcagcttggcttttgttggtgtataggaatgctagcgatttcgttcattgattttgtatcctggaactgctgaaggtctttatcagctgaaggagcttttggactgagactgtggaattttctagatataaaattacatcatctgcaaacagggatagtttgatttcctgtcttcctatttggatgcctgcccttcatttcttttttttgaattaataatagctgaatagtgactttattctcccttattcttagcatttacattatatttatagtttattaatccatctgattctaaaaagttttgcaatagccaaaaatttatcaaatatcaaaattctttcctaaatccaaagctagtgaaaaattaggtctcaaataaaaaggaacatagaactgataaagacagtcatagttttcatggaatagaagggccactaatagcctagagagggagaaggaaaatattcgttttttttttgtggatatccaaatttttatttatttttattatttttaatttttccataagttattggggtacgggtggtatttggttacatgagtaagttctttagtgttgatttgtgagatttttggtgtacccatcacccgagcagtatacgctacaccattatttgtagtcttattttttgtccattgtatcattcttatgccttacatcctcatagcatagctcccacatatcagtgagaacttacgacgtttggttttccattcctgagttacttcacgtagaatagtagtgtctcattcaggtcactgcaaatgctgttaattattcctttttatggttgcatagtattccttattatatatatatatacatagacacacacacaccacagtttctttacccactcatagattgatgggcatttggattggttccacgattttgcaattgtcagttgtgctgctataaacatgcatgtgcaaatacctttttcgaataatgacttcttttcctctggtagatacccagtagtgttgctggatcaagtggcagttcttgattcttttagttctttaaggaatctccacactgttttccattgtggctgtactagtttacactcccatcagcagtgtagaaatgttccctgttcatcacatccatgccaacatctcctgttttttgattttgattatggccattcttgcaggagtaaggtggtattgcaatgtagttttaatttgcatttccctgatcattagtgatgttgagcattttttcatatgtttgccggccatttgtatatcttcttttgagaattgtctattcatatccttagcccactttttgatggaattgtttgtttgtttttttccttactgatttgtttgagtttgttgtagattctggatactagtcctttgtcagatgtatagattgtgaagattttctcccactctgtgggttgtctgtttactctactggctgttccttttgccatgtgaaagctctttagtttaagtaggtcccagctatttatctttgttgttattgcatttgcttttcggttcttggtcatgaaatccttgcctaagccagtgtctaaaagggttttcccaatgttatcttctagaatttttatagtttcaggtcttaggtttaagtccttaatccatcatcagttgatttttgcataaggcgagagatgagggtccagtttcattctcttacatgtggctagccaattatccctgcaccatttgttgaaaagggtgtcttttccccactttatgtttttgtttgctttgttgaagatcagctggctgtaagcatttgggtttatttctggattctctattctgttccattggtctgtgtgcctgtttttataccagtaccatgctgtttgggtgactatggcctatagtatagtttgaaatcaggtaatgtgatgcctccagatttgttctttttgcttagccttgctttggctatgcgggctcttttttggttccatatgaattttagaattgtttttttctaattctgtgaagaatgatggtggtattttgatgggattgcattgaatttgtagattgcttttggcagtatggtcattttcacaatattgatttttctcctgcatgagcatgggatgtgtttccatttgtttgtgttatctatgatttctttcaacagtgttttgcggttttccttgtagaggtcttttgactccttggttaggtatattcttaagtattttattttatttttttgcaggtattgtaaaagggattgagttcttgatttgaatctctgcttggttgctgttggtgtatagcagagctactgatttgtgtacattaatcttgtatctggaaactttgctcaattcttttatcagttctaggagctttctggaggagtccttagggtttccaaggtaaacgatcataacgccagcaaacagcgacagtttgacttcctctttacctatttggatgccctttctttctcttgtctgattgctccggctaggacttccagtactatattaaagaggagtggtgagagtgggcatccttgtcttgttcccgttctcagagggaatgctttcaactttaccccattcagtattatgttggctgtgggtttgtcatagatggcttttataacattaaggtatgtcccttgtatgctgattttgtggagagttttaatcataaagagatgctgaattttgtggaatgccttttctgcatctattgagatgatcatgtgattttttgtttttaattctgtgtatgtggtgtatcacatttattgacttgcatatgttaaaccatccctgcatctgtggtgtgaaacccacttgatcatggtgattatctttttgatatgttgttgtattcggttagctagtattttgttaaggattttagcagctatgttcatcaaggatatcagtctgtagttttcttttttggttatgttgtttcctggttttggtattagggcgatgctggtttcatataatgaattagggagggttccttctttctctatcccgtagaatagttttaaaaggattggtaccaattcttctttgaatgtctgtagaattctgctgtgaatccatctggtcctggactttttgttgttggtaatttttaaattaccatttcaatcttgctccttgttattggtctgttcagggtatctaattcttcctgatttaagctaggaggtttgtatttttccaggaatttatccatctcttctaggttttctagtttatgtgcataaaggtgttcatagtagcctagaatgatcttttgtatttcagtggtgtcagttgtagtatctcctgttttgtttcttagttatgttatttggattttctcccttcttttcttggttaatcttgctaatggtctattaattgtatttatcttttgaaaggaccagctttttgtttcatttatcttttgtattgtttttcttgtttcagtttcatttaattctgctctgatcttggttatttcctttcttctgctgggtttgggtttggtttgtttttgtttctctagtccttgaggtgtgaccttagaatgtcaatttgtgctcttacagtctttttgatgtaggcatttagggctatgaactttcctcttagcactgcctttgctgtatcccagaggttttgataggttgtgtcattattgttattcagttcaaataatttctatcttgattttgtttttgacccaatgctcattcaggagcaggttatttaatttctatgtatttgcatgattttgaaggttccttttggagttgatttccagttatattccattgtggtctgagaaagtgcttgatatgatttcaattttcttaaatttattgaggctcgtttcatggcctgtcatatagtctatcttggagaaggttctatgtgctattgaatagaatgtgtattctgaggttgttggatgaaatgttctgtaaatatctgttaagtccaattgttccaaggtatagtttaaatccattgtttctttgttgactttctgtcttgatgacctgtctagtgctatcagtggggtattgaagtctcccactgttttgtcttgctatctcatttcttatgtctattagtaattgttttataaatttgggagcttgagtattaggtggatatatgtttaggattgtgatattttcctgttggacaaggccttttaccattctataatgtccctgtttctgtcttttaactgctgttgctttaaagtttgatttgtttgatacaagaatagctacccctgctcacttttggtgtccatttgcatgaaatgccttattccacccctcactttaagtttatgtgagtccttatgtgttaggtgagtctcttgaaggcagcagataattggttggtgaattcttatccattctgcaattctgtatcttctgagtggagcatttaggtcatttacattcaatgttagtattgagatgtgaggtaccgttccattcattgtgctatttgttgcttgtatatcttggttttttgtttttgttttttaaattgtatttttgttttgtaggtcttgtgagatttatgctttaaaatggttctgttttgatgtgtttccaggatttatttcaagatttagagctccttttagcagttcttgtagtggtggcttggtaatggtgaattctctcagcatttgtttgtctgaaaaagattatatctttcctacatatatgatgcttagtttttctggatataaaattcttggctgataatgattttgtttgaggaggtggaagacagggtcccaatcccttctagcctgtatggtttctgttgagaaatctgctgttaatctgttaggttttcttttataggttacctggtgcttctgtctcacagctcttaggattctttccttcatcctaactttggataacctgatgaaaatgtgcctaggtgaagatctttttgtgatggatttcctgggtattctttgtgcttcttatatttggatgtctaggtctctagcattaccgggaaagttttcatttattatttccccaaatatgtttcccaagcttttagaattgtcttctttctcaggaacactgattattcttaggtttgcttgtttaacataatcccagacttcttggaggctttgttcatattttcatattctttttgctttgtctttgttggattgggttaatttgaagaccttgtcttcaagctctggttttctttcttctacttgttcagttctatttgctgagactttccagagcatttcacatttctaaaagtgtgtccaaagtttcctgaatttttgattttttttctttaagctatctatttccttgaatatttcccccttcacttcttgtatcattttttggatttccttgcattgggcttcccctttcttggcccctccctgattagcttaataactaacctgaattctttttcaggtgaatcagggatttcttcttgttttggatccattgctggtgaactagtttgcaaaaaaaatcaactcctgggtttgttggtcttttgaatggtttttcatgtcttgaattccttcaattcagctctgattttggtgatttcttgtcttttgcttgcttagaggctgatttgtttaggcttctctaattctttcagttgtgatattaagttgctaatttgagatctttctaattttttttttttttttttgagacggagtcttgctctgttgccaggctgtgagatctttctttctttctttctttttttttttgagacggagtcttgctcttgttccaggctggagtgcagtggcgtgatctcggctcactgcagcctctgcctcccgggttcaagcgattctcctacctcagccttctgagttgctgggactacagatgcacaccaccacacccaggtaatttttgtatttttagtagaggtggggtttcaccgtgttggccaggatggtctcgatctcttgacctcatgatctgcttgcctcggcctcccagaatggtgggattacagacatgagccaccacgcctggccaatctttctaactttttatgtggctatttagtgctatgaatttccctcttaacactgccttagctgtatcccagaaattctaatatgttgtatctttgccctcattagtttaaaagaacttcttaatttctgccttaatttcattttttacccaaaagtcattcagaagcatgttaattttcatgtaatcacatggttttgggtgattttcttagtcttgacttctattattattgcatggtggtccgtgagtgtgtttgttatgatttatgttattttgcatttgctgaggatattttatgtccaattatgtggtcgcttttagagcatttgctgtgtggtgatgagaagaatgtatattttattggttttggatggagagttctgtagaggtccatcagatccatttggtccagtgttgagttcaggtcctaaatatcttcgttaattttctgcctcaatgatttgtctaatactgttggtggaatgttgaagtttcacagtattattttgtgggaatctatgtctctttgtaggtctctaagaacttgctgtatgaatctgggtgctcctgtgttgagtgcatatatatttaggatggttaggtcttttattcaattgaagtctttaccgttatgaaatgcccttttttgtcttttttttatcttttgttttgtttgaattctgttttgtctgaaattgggattgcaacccctgtttttttctgatttccatttgcttggtagatattcctgtatccctttatttatttaattattttttatttatctattttattatactttaggttctagggtacatgtgtacaacatgcaggtttgttacatatgtatacatgtgtcatgttggtgtgctgcacccattaactcatcatttacattaggtatatctcctagtgctatccctcctccatcccctgaccccacgacaggccctggtgtgtgatattccccaccctgtgtccaagtgttctcactgttcagttcccacctatgagtgagaacatgcagtgttttgttttctggccttgcgatagtttgctcagaatgatggtttctagcttcatccatgtccctacgaaggacatgaactcttccttttttatggctgcaaagtattccatggtgtacatgtgccacattttcttaatccagtctatcattgatggacatttgggttggttccaagtctttgctattgtgaatagtgccgcagtaaacacacgtgtgcatatgtctttatagcagcatgatttataatcctttggatatatacccagtaatgggattgctgggtcaaatggtatttctagttctagatccttgaggagtcaccacactgtctttcacaatggttgaactagtttacagtcccaccaacagtgtaaaattgttcttatttctccacatcctctccagcacctgttgtttcctgactttttaatgatcgccattctaactggtgtgagatggtatctcattgtggttttgatttgtatttctctgatggccagtgatgatgagcattttttcatgtgtcttttggctgcataaatgtcttcttttgagaagtgtctgttcatatcctttgcccactttttgatggggttgtttgattttttttcttgtaaatttgtttgagttcattgtagattctggatattagccctttgtcagatgtgtgttcctttattttgagcctatggttgtcattacgagacccattaagaaatgggtctcttgaagacagcataccattgggtcttgcttttttatccagcttgccacctgtgcctttgaagtgggacatgtagtccatttacattaaatgtttgtattgatatgtgtacatttgatcctgtcattgtgttgttagctggttattctgctggcttgtttgtgtggttgctttatattgtcactgatccgtgtatttaagtgtctttttgtattagctggtagcagtctttcctttctatatataatgctcctttcaagatctcttgtaaggcaggctggtggtaattaacttcctcaacattttcttatctgaaaaggatcatatttctccttcacttaggaagcttagtttggctggatgtgaaattcttgattgaaggtttctttaataaatattgaatataggcccctaatcttttctggattgtaaagtttcagctgagtgatctgctgttagcctgatggggttccctttgtaggtgacatgtcctttctctctagctgcctttaacatactttcttccattttgacctttgaaaatctgttgattatgtgtcttggggatgatcttcttacgtagaatcttgcaagagttctctgtatttcctgaatttaactgttggcctctctcacaagattaggaaagttttcatggatgatattctgaaatatgttttccaagttgtttgctttttccccttcgctttcagggataaaagtgaataatcccatacttcttggaggttttgttcattgcattgtaggaatggacaaaaaagtaggtctacttttattctttttgctttatttttgtctgactgtcttatttcagagagccagtctttaagttctgagattctttcttcagcttggtttattctgctgttaatacttgtgattggattgtgaaattcttgtattgtgttattcagccctgtcagatgcgttacgttcttttttatactggctatttcctccttcagctcctttatcatttggttgtgattcttagttttcttggattgggtttgagtcttgatgatctttattcctgtccatattttgaactttatttccgtcatttcagccagctcagcctggttgacaactcttgttggagggctgatgtggttgtttggagaacatgcgtcactctggtcatttgagttattggagttcttgctttggttctttctcatctctgcatatggctgttactttaacctcagtgtagatcgagtagtcagtagtctattgagaagtcaatagacttcttttcttgtgttttcacagggccaagcctttgtgcagggtcttgatgtgaagctgacttcttgtctttagtttaagaggagggtatattagcaagctatttctggtgttgaagctttggggtgtgatgcggtaggtgacatttaggcatattaatcagctggtagactcttgcttggttttgtggctcccttatatttccttacaggtggagccatgttccctcttaatgtgtggggtcctctcccctttgagtgctggctgtagattgcagcttggcactcctgggcctgcccagtgcagttctggatgtgctcagtgtttatgttccttccccatcttggagacagcagagaaagggaccttagtagtgtttgtgccaagggtcttttgcttgtctcatgggggctccactccagagacgtgcaggtctgcaatcacccagtgcaatcagcccaggatggagggcctgtgctgtggccccagccaggggttctctgtctggtgatgagcactgggggtgggtaggtggaacccatgggagatggactggtctcctccccttggctcaactgcagcttgttggaggtatggataaggcattgagggtctttgctccttcattagtctgagggtagcaagggcagttctgctgcagaggcagtggcagggaggctttcagttgcccctggttgctctgtccagggagttgcagagctgctactggtttgatatatctggcagggggtggctggaggcccaggcctggcggacctgcccagtgaggagataatatgggaacatgcacctacataacaggctggccacttttccatagggctgctgtggtatcctgggggcccactccagtccctagtcaccttggattttccagtacctggaggtatcaacagtgaagactgtgaaacagcaaagatggtagtctgctccttcctctgggagctctgtgccagcaaggtatggacctgttgcttgcccaaacacacctgtagttggtggctggagaccccacatttctctaatatatgtcaagtttactgcatggtgcctaggtctgggaaatgggaagttgatgagacataaccctggtcctcaagaactctctttgtagtggggggagctaagatgtccataaaggactcaatgacaaggtgaaagagaggagtagcctgagagctgtattacctaagttcagagaagtttgagaaaagatagagttgatactggctttaaatgatttgggtaaatggagatgtgcagcttacagagagtagtagatgtaaatggttaggtgctggaaagtataactatgtttggggaatggtgttagtggtatgattggtatggtttaatgtctatgaataagaatagcagaagatcaaattgtcaaagtaagtattaccaagcttatgagtttgaattttagtgtgtgtgctggtggtttctaaacttttgattgtgtcccctcagttaaaatattacccctgcccacagatgtaggcaatataaaatgggggttttaaaaaggagaaaaatagaaatacatattagtaatttctttccccacctcagtagttcctcttgcacatatccagtttagaatcattgtcagctactggtgttattgttggagatgtgttttagcaatagggatatgaaacatcttcatgtttttctccatatgtatatgtatgtacagaaaaattacacattatatatacacacataattttattttagaaaaacaaagctattggcaatattcatggaatagtattggataaaagttattttcttgttttagtgaaatattttaggtttttgatagaactggtttcattcattacagaagtcagtattgtatatgaaagttttttgaaaattccaaagtgctgtgtatattaggtgtttctttgaagggatagttcaggtgaagaattttttttttttttttttttttttggagatccagtctcgctctgttgcccaggctggagtgcagtggcgcgaactcggctcactgcaagctctgcctcccgggttcacaccattctcctgcctcagcctccctagtagctgggactacaggcgcctgccatcacacccggctaatttttttttttgtattttttagtagagacggggtttcaccatgttagccaggatggtctcaatctcctgacctcatggtgcatctgccatggcctcccaaaatgctgagattaaagatgtaagccaccgcgcctggcccatgtgaagaatattttaagaagttttggattttccttttatttctctctatagtgctttgcacagttctgtgtttcataattatggaaaatattggcaagaattttaatgattctctcatttcaagttttctttgttttctagttgccagtaaattttatcatatagaaataatttttagaggaggaaagcattttagagtttgtgtagtaattatttgtgtgctatcttgccctcttccttggcaagtagactataaaaaactgtaggcttatagatattgtcttagtttgggctgctgtaacaaattatcacagactgggcaacatcaacaacagacttttgtcatcattttggaggctggtgggggcctgcttcctggtttgcagatggctgtcttctcattgtatcttcaaatggttgagagcagagaaagaagcagcaaactctcatgaccttattacctctcaaaggccaatggatatatttgcttgttctattattcatggtagtacttagcaaagtgttttctaagaggctgtctataaaacttaccaagcaggcctcttcattttgcccatgaacgtctagcctcagaaaggttgagcggcctgcaagaactcacattgctcattagtgaaagacctgggtcttttgctatatgtctctcgaaactcaagttcattgcctgttctactatagtttgttgcctctcctgctttctctgatttaccctcaagcaggtgtttccattgcatattttaaatacttcagcagctccagggtacagattgtgttatattcaacttagtgatctctgatacccagcacaatgccttatggagtagatgctcaggatctgatgaattaccttgtgagagctgcatgtttgcatactcttgatttgttgagaaaactaaagtaacttggggttgcacctcagtgtactgtttataaaagcaaagattaaactgtatacctgataatatgtgtgaagtgctgtacatgcagaatatttctgaaatcccaattgcaaatgtttatgaactcggaaaactcctgaagaactgttgcagttggctgcagtagttcaagctgttattcactggacagtttttctctgcagtatgtaagatgtgaattttatattttgcttcaaaatttatgatgcagcataaaccaggtttaaagtctagctaccttgcaaggagcagcttccttcttcatggttgaactctccagagtaatccttgggttgctatttttgtggtcacctttgtggatttttttctctttcctcattcatggaaaagatcagaccccctatactttttataataaactctaattttccagatcatttatcatacttaagaattataattacccattttaaaagcttcagcctagattggctagaaaatacttaatatttttatacattatttatccttttttttttcactgagctgtgttgctttcattgacacctgaatgcactgaaacacagattttatccctatgcctacttgtgatgagaaagtatcagcagattcagttgctaggaaacagctgaatactgaaatagtttttttttttggtggggaggggtacttgtaaattcagttctttgacacgtctactctcatacagcaaaaatttcttcggtcactacaaagaaagatgcatcacctgttagttttccaatttagaaattttgcacaggggagctgggcatatgtaaatgttacagggttgataaagtgctgagagtgtaatttttaacagtgactggacattgtaaagtaatgattatgtatatgcctttgagtttcagttttctcaaaattttctgattcatcattaatgagagaaagagcaagaacaagagagaaacatatgcaaacacatacacatgacacataggaatttaaaccaaagtaaaatactgtattaattaaactaactttctcatagtaataggattggccacatcctatattaaattacccagctctggatttttacctgtgatgcttaataattatgtgccagagcaagaataaatgttaaaaagaagtgtgtggtttaactttcttttataactgattgccatttatttttgtcatagtagtataacctttaagtaacttttcctgagtagccactatgtgccaggcaaaaacatgggagacataggtatgtttaagctttcagggtgcctagtatgtgtgagaggtggcagccaacagattaaattgagaacatatatgagaaatttaattgtgtctggtacacagtatatgcttattaaaaaattagaaacctgccttcatcatcagtaccaccatcatcatcatcacccagcaagccaattcttcaactaaaatcagttcagagtaagcagggagacatataaacagtcatcatatgtgtggtcaataaaaagagaagtctgtaccaggtaaagaggcagcacagaaaatagagtgatggacttgtctggggattgcagagagagcttcagagacgtcaggtctgagctggattttgcaaggctctctcttagatgtaagcattcccttgaccttgtcttttttagggagtagggagtggggagtaagaccactgctttttttttccttcttaaattttttaagttctctcatttcttccttgtccatacccttgctgataatgaggcttgacatctatcttcctgcctgctccattcagacagatgagtaccgtccatggtttctaattctgtaccttcaattttcactgcttgtctgtttaattgcacatatacgtttaggaatttgtcaaggagtacagaatccatcttctgatttacatgcattgagagtcttgtgtctcagaaatgaaaatcttaataaggcttttccatctttatccgagtgacagagagaaccctgtgaacttaagtaggcagtatatatactaaaattggagtggtgcagaaaatgttacccaacaagttctaggagagtaatgtgtaagttcaaataaaaaataaaaacaaaaaatgaaaatcgtctgagactagttgattggaaataaccaaggaatgagagaattgagaataacaagcttggtttcccttaaaattttaaaggggtactaagagtagaaggaaatgttttatgagactcttgctgttttgtataaaatcttatttttaataattttatatttttcatgcctacattttaaaagagagacctaacatacagttatgagacttcagaaatatcatggaaagtacttatgctctggttgcggttgtcccttgtggcactatgattttgttcatgtataagattgtatttgttgagttgcaaaacagccaggtgaacagtgtcattgagtttactaaattgaggtgtgaataaggtaatgatctagaaaacagataactgaacctggaaaaagatatagaagacagattacttgcttataaatttgaaacaaaagaatggtaaacaagattggtaacccgaatgttatcttctttaactgtgtcatcaaaaactccacagttataacattgactattaaaggctaaaataatggaaaggaaatgaaataatgttcaatctttgaggaaaaaatgaatatacctttttggattttggcggggcaactataatctcaaagaaagagaataacaatttgcatttataatcttttcttctaagtagcttaaagttttgtaagtatattttcattaatcctttggactatatttgaattttgttcaaaatattaagaaggaaataatctgtacttcttgtagatggctgaaaaaatgacatactgaaagtcacagattttttttttcacttaaatggcttcattgttttatgtttccagtgtgggttttttttttgtgtgtgtgtgaaagcaagtttattaggaaagtaaaggaataaagaatggctactttataggctgagcagcctccactgttattttttagcactttgcctaaggaatttatttatccttcaaatacgtatcatttgcatattgcgggttaggcctgaggcggtacacagtggcacacccacatggggtgaagagcagggagaaaaagagaatttgaaactgtgtattttctccttcaatttcatgtggcattaaatcattcttttgaggtcaagagcctctgaactgattagttaaagaattggcttgctggatgatgatggtggtggtagtggtggtgaaggcaggtttctaattttttaataagcacatactgtgtaccagacacaattagatgtattatatgtgttctcaatttaaccctgttggcaacgttatgagatggttatttgcatgaattttgcagagagggaaacttgggaaggttgggtaacttatccaaggtcacagaattctaagccaatgtacctgtatctgtaatttttatgctcgtgatctttaatgatgttactctccccctttgtgggaagcaggcacaaatattccttttttttccccactttggatacgtgttggtgagcataaatgtgccaatcattgtgatatggcttcgatgagtggaagaacaccagggctcttgtctcatgcccaattagataagatgacatgggtgcatgtggagtggttttaaggagcggagagtttaataggcaagacagaagggagaagaaagaagcaagaagcgcccctttacagagccagagggagagggggctccaaagctgagagaagagacccccagtgtggtggaaacctgccaggtatatgaagaggctggaggagacggtgtctgatttgcatatggctcaggtgattggtttgaccaggcatgtcattcacatagccacccacataataaatgcataataaatgccatgagaaagtagatttgttgggggagtaaattgacaaatcagaagattttattgtgcttttgtacaataaatagcctttagcatttaatttcctccctccacccctggccctgggcaaacactcatctgtttctgtcatgataattttgtttgttttagaattccgtgtaaattgaatcatacactatgtattcttctgcatttggcttttgttgatctgcattgtgctttcgacattcatctatgttgttgttgtttttagaggtagggtcttactctgtcacccaaactggaatgctgtggtgaaatcatagctcattgcaaccttgatctcctggctcatgggaccttcctgcctcaacctcccaagtagctaggattataggtgcataccagtacacctggctaatttgtaaaattttttgtagagacagggtctcgctgtgtttcccagactggtctcaaactcctcccatctcagcctcatctatgttgtttcatgtattggtaattcattcttctattcttttatttttttaatttaaaacattttttccattctttttaattgttaggtagtattccattgtatgaatataccacaatttgtttatctagtccccaattcaaatgtccacttgatggacatttagattgtttccagttcttggctattatgaataaaactgctgtgaatatttggataaatactttttttttttttcgagatggagtctcgctctgtcgcccaggctggagtacactagcacgatcttggctcactgcaagctctgcctctcgggttcacgccattcttctgcctcggcctcccaagtagctgggactacaggtgcccaccaccgcaccggctaatttttttgtatttttagtagaggcagggtttcaccgtgttagccaggatggtctcaatctcctgacctcgtgatcgccctccttggcctcccaaagtgctgggattacaggtgtgagccactgctcctggcctggataaatacttttaaggaggattgctgggctgaccaataaatatgtttaaagtatgtttaactttatgagaaattgccaaactatttccaaagtggatagatatgttcatctccagtagtgtatgtgttccagttattctaccaccttgccaaaagttgatattgtcagttttaaattttaatcattctaatggatgtatgatgatatctcattgtgcttttaatttccatatcttgaatatgtgtgtgtgttgcaaatattttgtcccagtctgtggtttgccttttgttttaacaatgtcttttgaagagcaacaaagttttacaatttgattcagtctattttatcagtttctttcttttatggtttacttttattaagaagtattcaactgacccaagagcatgaagaatttttcctgtattatctttttgaaattttatagttttagctcttgtatttaactctatgacccatgttttggttaggttttagacatgttgatttttttttccttgttggtttccttgttggttttggcactattagtagaaaagactgggccgggccagtggctcacgcctgtaatcccagcactttgggagccccaggtgggtggatcacatgaggtcaggagtttgagaccagcctggtcaacatggtgaaaccctgtctaaaatactaaaaaatacaaaaaattaaccggctgtggtggcgggtacctgtaatcccagctactcaggaggctgaggcaggagaattgcttgaatctgggaggcagaggttgcagtgagctgagattgcaccactgcacttcagcactccagcctgggtgacagagtgaaacgccatctcaaaaaaaaaaaaaaaaaagaaagaaagaaagaaaagaaaagacttttctttttcattggattccccatttttcaccttgtaaagaataatttgatcatgggtatgtttctgtacttttttctgttccattgatataaatgtctgtccttgtaacagtatcactctgtcttgattattgtagctttataataagttttgaaattaggtagagtcagtgtttcaattttgatctttttccaaaaattgttttggctcttctaggtcttgtaactatgctaaacttattaattttagtagcctcttggtagattatttggtatattctacatagatgtctatgttgtctgtgaatatagttttattttttttctttccaactgtatgccttttatttatttttcttgccaattaccctggctaggacctctgctacgatgtttaatagaagtgatgagagtgtgcattcttgtcttgttcctgaacttaaggatagatacatttagtctgtcactattaagtgtgatattacctattggtttttcatagatggccttttatcaggttaaggaagcttctttctgtttctcgtttgctttttttttttggttatcaatgtgatatagcttggatatttgtccctgtccaaatctcatgttgaaatataatccccaaagctggagatggggcctggtgggaggtgtttggatcatgcgggcagatctctcatggttggtgatgtcttcatggtaatgagttctcctgagatctggtcatttaaaagtgtgtggcacctatccccccaactctctctctcttgctcctgctctcaccatgtgaagtacctgctcctgcttgaccttcctccatcagtaaaagctccctgaggcctccccagatgcagatgtcgctatgcttcttgtatagcctgcagaactgtgatccaattaaacctcttttcttataaattacccagtcttgcctaggcctagtagcttacgcctataatcctcgcactttgggaggctgaggtaggtggattgcttgagcccaggagtttgagactagtctgggcaacatggtgaaaccttgtctctataaaaagtatgattaatgaatgtggtggtgcaggccagtaggcacagctacttgggaggatcacctgagcctggagacgtcgaggttgcagtgagctgtgattgcaccactgcactgcagcctgggccacagagtgaggccttgaccatttattcatctactgggttgacaatattgtttaaattttttaaaatctgtgaatgtgtacttgattacattgattaaaacaatattaagtcaattttgcattcctgggataaacctactatgtcaaggtatattacctttttttatatattactgaatttttgctttactgccaatgagggatgttgatctagacttttcctttcatgtaagggctatctgattttggtatcaggtaatgctgaccttgttaatgagttgggaagtatattccttcttaagtatgcaatttatatagcagcatagtataaataatacaatttaataatgtaatatatagagttgtttaaattgccaacatttttctctattttaaagttttgtctaaaatagatcttaactaggtttgtcttataagctggtttaatattttataattaaaatatttttaatattaagattttttgagaacatagggaaaaagctctgtggttttaacaaatatataagtatgctaattttaaaacactaagcctttttgtagaaaatttggagagtacaagactgcatgaagacaaaatcattatgtagattttattgttgagataatatggaatttaacatttggaactcattttcttaacatgcacaagcattttctcaatattttaatttttattaacagcatgcttatgactgtgtaatctatcacatggatttagaatatttgtctataatataagtatatttgttttatttatctaattattgatattagacttttaccctgttagcaattttctacaatcacatataatgctgtgatgagcacttcctatgtaagcctctgtttttatttacgatttgtttctttaggtagatttataaattaaattattgggtcagagggtcgaaatgtcttgaagctcttgatacatttatggaacggcttttatctatactacttcagtttgtacttctccacatgatatacgagaagagctggttcaactcttcaattattcaggattttacagttaaatatcttggctaacatgatgggtaaaagtagtaacttattgcattaattttcatttctttagttacttgggaaataattttttaattttcttgaaaagttttagacaagtcacccagaagagttatgcaacagaaatattaagaggaaataaatatatgggaaaacaagttcctgtaataaaagaaacagaaatggaaaaacaaaggcataaggctatataaaatctgtatgccatgaagaaagagaaagtagttttagtttgtattaaataatttcattacgttactgggaaatggatagagtgatatagagtataagaaccatagtcttatcttctcctttcttcgaaatgtactaacacttcataagcttaataaaagaacctcaatgcttgtaagttagttttttgtggcttctatcattgttgaaagtttctggggagtagctacctgttaactaaaaataggtatctggagcatggcaaaagagaccacttcagccttgcaactatgatattgatccactcaaaagcagtaatttgaaagaagtgaaagaaaatagcggtgaagctcaaactatgtgaaggtagaaaatttggtctttacagtaaatttgatagttgtctaacagaaacttaggggagaaggaaaaaatggaggggaataaatttgaattgaagtgtattttgatggataaaagaaaatgtgaatttttaaatataaacttggtatataacttttccatagtaggtaagtttatttataacctatttgtttccctaaaacatcaaggcagcttataataaaatccattgaccgaaatatgtattccaatatcaaatggcaaattccaacaatacaaaaactgcaattatgtttgcaccaacctgatagtaaaagaaatagaaaattagaactaatggacaactcataactcttgaatatcagcatggatgctgtgcttgggcttcacatttggtcataaacatccagggagtaaagatgaaaaggaagctactcatttacatagaaaggaggggctgtagcaaattctgaaatatgagacttaagaacgtaagtaacttgctgtattagttaaaattttactggaggatatatgaattaacattaaaaaatcatcaaagtgtcaaatattccaatatattaatactgttgtaaaacattatagtagacatgtgatttgactgtgtatcttgggatttatgtatttatctcatctatgcagtattcagtgagaagctactatacacttagcattcttaccagggctttgaagagtacagatgctttaactagtcccacattaaaatttaagtgttagacaagaaggcaaataaacagcaggaaatgcttaaaggtaaagttaggggtacttgctatgactacattgatgtggactaggcagaatacttcatttagttaagggggaaacaagcgtttggttaagtggggaataagtcatggtataggaagaagttctgttgagatctgctgtgggaaggattgaggtgcacctgagctttttcttttgaattcagttcagagcccaaataatatcataatatagaatgttaagagatcccttttgatatcttcttcaaaggatgcacaaatgatacttatttgaagaacatgaatatttctatgacagttgagaaacatagatccatcttggtatccctaatgcttaccatactgctttgcatattatactggttctataagtgtttattgaatgaactacttaaaagagaaaatgggagagaggtgttctcaatttgtaaggataaatattaagtataaaatagaaacctttaaacctgtaaagaaaggatttagtgatgagagttgtttatttttctaatgtaattatggtgacaacttgttaatattgttttcactggaatcttattaatcttaggaatttttatgtacttacaaaataattccatatatgaatcttttgttactaacctggtaaagaaacacagattttgaatagctagatggtagtagcggatgaaacattgcttcttaattatcagagttctttgattgccttgtttattgcctatcagcctgctggactgttatgtattggatatttctgacacagctaaaattactttgcctttctttatgatatatataaattttatagcctttatgcctttgttcttttatttctgtttcttttacctcaggaacttattttcccatatatttatttccccttaatacttgtgttgcataacttctctaaaagtcttgaagagactgaagaagtatttttcaagtaattaaagaaatggaaattaaaagcaacttgttatttgtagaatatgtaaacaaatgtttctgaagtgctttctacatatgaggtatagactagaagtggtttaaggcaggatttttgatgtaagtgacttatatactcttctacttgacatgaacaaataaacagataatttgtatagcattaaaaaaatcactgaatatccaagagctatgtcagttcagagaaggatggactagctataatttgttaaacactaaaagcaacactaattaatctttaaaacaaagatagatgttttatttacttattcagtcaccttttacttgttaaagtaagaaaaggaattacaggcctacatcaaagatattgcaggttctgttcgagactaatagagtgaatattgcaataaggcatgccatataaatttttgtttcccagtgcatgtaaaacttatgtttacaatatactgtagtctattaagaatgcaataccatcttttaaaaaacaatgtacataccttaatttaaaagtgctttattgctaaaaaatgctaatgatcatctatctgagtcttcagtgagttgtaatctttttgctggtggagggtcttgcctcaatgttgatgtccgctgactaatcagagtggtgattgctgaaggttggagtgtctgtggcaatatcttaaaataagacaaccattcagtgtgctgcattatttcaaaagaatgagagtctgtcctctcaaagcattctactacttgataaactaagtttatataataatctaacttctttgttgtcatttcaacaatgttcatagcatcttcaccaggagtagagtctatctcaagaaactactttctttgctcatccatgggaaacaactccacatcctttaaagtttcatcaccagattgcagctgtttagtcccatcttcaggctccacttctaattcgagttctcttgtgatttccaccacatttgcagtgaacttcctccattgaagacttgaacccctcaaagtcaaccatgagagttggaatcaacttctgtatccctgttaatgttgatatttcctctcccgtgaatcacaaatgttcttaatggcatctagattggtgaatcgtttcagaaggttttccacttactttgctcagatccatcagaggaatcgctatctatagtagctctagtcttacaaaatgtatttcttaaataataagatgtgaaagttaaaatattcctgatccatgggcagcagaatggatattgtgttagcagatatgaagacactaatctccttgtacatctctatcagagctcttcagtgaccaggtgcattgccaacaagcagtaatattttgaaaggaaacttgttctgagcagtgggtctcaacagtgggcttaaaatattcagtaaactatgctgtaaacgcatgtgctattatttagacattattgttccatttctagagcacaagcagagtggatttggcctaattcttaagggccctaggattttcagaatggtaaatgagctttggcttccacttaaagtcaccagctgcattagcccctaacaagggaatgagcctgtcctttgaagctttgaagccaggctttgacttctctctagctatgaaagtcctatatggcatcttcttccagtattaggcagtttcatctacattaaaaagctgttgtttagtgtagccacctaaacaacagctttttcatgatcttagctagatattctggataacttgctgcagcttctgaagctcttgctgcttcaccttgtacttttatgttatagagatggctgctctccttaaacctcatggacccatctctgctagcctccaacttttcttctgcagcttccccacctttctcagcctttatagaattgaagagagttaggggcttggtctggattaggcttaagtttaatggaatgttgtggtccatccagaccattaaaactttctttatattggtaatatggctgcttcacttcactttcttctttttttcttttttttttttgagacagagtcttgctctgtcactcaggctggagtgcaatggcgcattttcagctcattgcagtctccgcctcctgggttcaagcaattctcctgcctcagcctcccgagtagctgggattacaggcatgcaccaccatacccggctaatttttgtatttttagcagagacggggtttcaccatgttggtcaggctagcctcgaactcctgacctcaggtgatccacctgcctcagcctcccaaagtgctgggattacaggcgtgagccagcatgcctggccttcactttcatatcatttatgtgttaactggattagcactttgaatttccttcaggaacttttcctttgcatttacgactttgctcactgtatggcacatgaggcctagctttcaacctatctccatttttgatatacctttctcactaagcttagtcacttctagcatttgatttaaagtgagagaggtgagaatcttcctttcacgtcaatacttaaaggccattgtgagttactaatttcaatattattgtttctcagagaatagggaagctctaaggagaggagagagacaaaggaatggctggttggggaaatagccacaagacacacaatatttcctgatgaagctcatcttataggggcatagttgatggtgccccaaaacaattacattagtaacatcagagatcactgatcatagatcaccataacagataaaataataatgaaaaagtttgagttattgcaagaattaccaaaatgtgacgcagaaacacgaagtgagcacatgctattggaaaaatgcagcccattgtctatctcaatgcagggttgccacagaccttcaaattgtgttcagttttaacacaatttgaagtgcagtaaagtgaagtatggtgaaatgaggtatgcttgcatgcatttctcttcttttggcaagtatatgtgcagccatctagatcctcgctaatcaattagagcacaaagattataaatcattattttaacaggaatatatcctaattgcaaatatgtgaatacttatagccagaaggttgctttaacgcagctctgaggaaaattgtattgtaaaataaatgctttaaaaaatgcctcaacaaacaagggagaataggaggtacttataaagaagaaggcttaaaaatggccatgtaaaaatgctatgatagtaagagtaaatggagaaaataggcagaggaccacaaaatgtaggggagattttagggaggaaacgcaaatagaacaaagtttattttggtcaaaaggaagttttaaaaaaagaatcctagagccgaattaaaaagatataggatgaataaagattaagcttagaagtagtaatgggataaggtaatgtttcctatgtgtgtggttttttttttttttttttttttttttttttttttaacagattctcactctgttgccaggctggagtgcagtggcataatctcggctcactacaacctctgcctcccgggttcaagcgattctcctgcctcagccttccgagtagctgggactacaggcgcgtgccaccacgcccagctaatttttttttgatatttttagtatagatggggtttcaccatgttggccaggatggtcttgatctcttgacctcgtgatccacccgcctcggcctcccaaagtgctgggattacaagcatgaaccactgtgcccggcctgtttcctatatttttatattcttattaattcattaaatatttcacgattgcctcctcagtccacagtctctatagagggacttaggaaatagctttcatgttttacttttgtcatgccagttagaaactagattaattatctgcttgccaaacctgattatcttttgtattgctactcacatttcattgtgtaaaaggggtgaggctgatggacaaattgtaggtctccttttttctaggaatgtactttagaatactgagatttaattattttggggtacattttccatagtgctttctgtatttacttttactttattgagttgttcagagaattaaatatttgatgtgaattttatatgcatgtgtgattgtagtggtgatggtacaaggggaactttggtgtagaagaatttgttaggatgctcttgcaatattcatgtaagaagttatgaagacccagactggaatggtgacagtgaggataggagggagggacgagtgtgagagatgtgccctaggatcttggtggccattgatggggaatgactggttctggagaatggggtggttagactacggggagttgccatccatatcctagaattcaaagggtatgttgaacttagggttattctaggttggttttggtgtccaatagggttcactttggtgtatgtgatacagtgacaaaagtttcttgttatttccaatttataaagcctgtaatggcattgaggaggtttttggtggtctgtactgtgtggaggaggaaccagctatgacaaagggagggagtatttactggtcttaggaacaaggtgtggtttcctagggcatagtggctggcatcatgcaggcagggaatttgggctccagccaaatactctgagctagagactgggtccagttccagcaattctgttaatatatatttaccagactctggtatgattttgtatgaatttattataggattggagatgagggcaggagggaggggtagtatgtagtagtggttgcattcatatttaaccctcggtttttgaataaagtcttacatttgggaatttttttttaataaataaaatgtcttgctaatgtaagtgttactcccaccaatatagaagacagcactcaaattctcattctcttttgtaaccagatcataagcatatgacttatacttcgttgattagactcacctctcacaggactttgatttggaactgaggaaacagaacaggactttgatttggaactgaggaaacagaatcttcatcgagcttttgtgtttggtggtggcagtggtggatgtgagcagagactttctgcctttggtggcagcagtgtctttttggtggttgctagattgatttcccacagtgggagtggttttctttagtactctgtgggatgctaaacagcagtgatggccattttctattaataattagtcctgttttagaactaattagttcctcttttgagcctggaagcttaactttaagaatagttttttggccaggcacagtggctcgtgcctgtaatctcagcactttgggaggccaaggcgggtagatcacgaggtcaggggttcaagaccaatgtgaccaacgtggtgaaaccctgtctctactaaaaatacaaaaattagctgggtgtggtggcgtgcacctgtaatcccagctactcaggaggctgaggcaggagaatcccttgaacccagaaggcggaggttgcggtgagctgagattgcaccattgcactccagcctgggtgacagagggagactccatctcaaaaaaaaagaataatatttcatcttcccaacaattctgtgagcttcctagtagccttttaataaactcattttctgctagtcagcttcttccatgttcagctaacaatcttagctggtcctgggttgattagaagataaggcagcaaaatgaagacagaggctttttgatatctgccaggatggctaagaattgatccaaaatccatggggacttggtatcagattgtattttggggtgaattggaggaggaaggaaaataactatgttgatagtaggtctgtttggatgttggagggtatggaacaatgattttagttttggacatgtttactttgagatgccatagaaatattcacttgtggagatatctggcatgtaattggaaatgtaattctagcattcagaaaagagatcagggatagtagtgacagttattcaaggttgcattgaaattggattagagtactaagggtagcagcatgaaatggggagaaaggagaggcttttcacaattacagggcagatggtggaaggagacagtgaagaaatctgaaaacgaatcttctagaaggatggaagagcactcagagaagctcaaagatggtagaccaaggagcagatagtcaggagtatgaagactgagaagaggccattgtatttagtgattttcaagaaagtcatagaaaatagaacaaaaccttacagtggtgaataaaggactaaagtaatatctggaacaaaagagattaaataaaatttgagtcaaaaattttattagacatatttagagcccaaatcacaaaataaagtttgaaaccagagacacaacccctatctttttccttaacagatttttatcaggctagttgttaagtttgtctatttgagtaatggcactgatatatcaaattcttttgttttaatgaagcaacagctctctagtatgcaaaacttgggaaaatattttgctttacaattttagtgttcattaagccttattatgtaagctgtaagcaaatgttagagaattttaaatgtttgtgacatctgtgtttttattgtgaatgtgagttttcttttgtaagtattacaatgatcattgttaacagtttgaccttgctttacatttttgccagactattcagtgatagctatttgcatgctgtctttccttttatttcagctttccatcccacttcctcttatgttgccaaatgagaagcttgactattggtggttagagtctctgccactcaagattttcatttttctgtattttgaagtactgtctttgtatgcttttcttttctccattcaaagagcagtctctttacatttgatattctgatagaatttatctgctgaaaatcaaagtctgtgctccttgaattctggcttcaaaataatcatctagaatagatgtaagatactagaaccagatgaaagattcaaaagatgtcagtcttaatttataagtttattatctacaagactggatcttgactgtaccagtcttaaaaatatatcttgcattataatttgagctatgacatttcatcaaacgtacagtttaaatttatagaactcttttttttgcattaatttatgtagtcaaatagaagacattaaattcaaaagtatttcttttctttcttttttttttttttgagatggagtctctctcagtcgcccaggctggaatgcaatggtgtgatctcggctcactgcaacctctgcctcctggatcaagtaattctcccacctcagcctcccaagtagctgggattacaggcacccactttttgtatttttgtagagacaaagtttcaccatgttggccgggctggtcttgaactcctgacctcaggtgatcctcccgccttggcctcccaaagtgctgggattacaggtgtgagccatcatgctcagctgaaaatatttcttaaagatttatattttctgtcattattttatgcagtgctttaaaattaattgctattaacttttaattaatggaatatgatgacctgagtattattacatatcacagaactttaatgtaaagatacatcaatgaaatttagaattttacttagataccaagttaatataccaaaaatccatttagactaattttattaaaacaaatgtatcagaatttcagtggcaataatactgtttacatttttttgatggaattcttttttttttacatggtatggctagtatacaaatgatagggttttatgctaaacaggttttttttccccacatgcagcagaactctgcttacattatgacctttcagaataaattggcaagcaggtcagataccaagagctaagaaaggatggaaacaaatgtagtattttgcaggtgaatttttgagatgccccatttacttgaaattttaaataatggaggtaaaagactttagttgaagtttgaatgtctcagaatgatgaataaggagtttgtcaggtattatattttcagtgttagtgcagagtaattccttgtaacacaaatggctgatttttgtaatatgtacacacaagcttagtatggtatgataataagacaacaaaaacctagtagcctttgctttttttcactttgcagttgacttggtagcctatcggaaagtctgttttcatttcttcattagtattataccttggtgtttttctaataatttatggtagtttttttctttaatcagagaagttccagatgtaggaacatgttttcatagacgtttgcatgctttcacatagttcctttaattttccattattcttcaaagaagcatatatataattttcatttggggccagtgtactgtggttgacaacatataaaattaatcagagtcaagcagttgaaggttaacatgaaagaaatctagaagaacccagtgcaaaatataagacaacacaaactttacattagaccctattgctctgaatggattggagggatggcgaccttgccagttggagtgacatgagtgcagtggatgagctgtggcaaagtcaggaagcttgggagcagcagaattagcgaaatgttagtagttgctaggtaatagggtttatgttaaagatcggagactaagacgtggtcattgttaaatccccttgaggaatttatggtgaagtagccaattaaacttggtatgtgcaaagccaagggaagcttcatgttgccttagtaaacatctctaattgaatactaaaggatcccgtgctgcctggtgggtatatcccctagagtagtactcactgtgattaagggtacattgtttcagtaactgatcccttgaggcagtgaattgcccagtcagtgcaggagttttaagggtccaggtctaaaggtggaattgcatcttttggctctgtttgaagctccttcttgtgtgcctgcacaggagtgcagtgggtacatacctgtgagcacatgtaccctatttcttggaatgacattcttgcttttaattttgggctgactagaaatttttgtctgtgatgccagtggtgggtagataggtaaggatgggcacagtttagccagcgtggattgtgaaaaagtacatttatttcaggaaattgtaagaaaaacaaaactgggacctaatttaaacatcaggcactccgagaaagtagagattctttttctgttttttcagtgttagctgtctggagcttaactgagagatcaagataagttcagttcttctttgtcacatccacatcttacagtacttgaagcaatgtactttattaacaaaaagatagtacatttctagccaaagtagaggatttagggaaaagttcttttaaattttatccagggagagattaaacaacattgagagcctgggcaaagaaaagcaactagattttacatatttagttaattatataagaacagatggaaaagatatgagcaaatgcctgactccacaagataacatgagtaagtgctaaaataaaggtatttaaacttgtctagtagttggtaaacagcgtatcaagaatggagatctttgcaacagcttcataaaaagactttatcaaatttgggaaactcttatattaaggagattaccattaaatcaaagcaatgccttaaaaacacaatactggtctgtaatttaaggaggatcatatttatataagaagaatacattaaaaagacattgagttggataatttaaatggaagaaattagaatgtgcatttttgacatcagttattccacctgaagctagaaatattttttgatcagcaaagtcattgcaaataagttatattagtcttaatgtaatttgcataatttgagacaactaaaatatattattaaatgaactaataactgtcactttagagcttttatatatatgcaaataaatactgttcaactaaagtaactcaagaaaaaccttgctagtgttcccttaagtgtaggatagaggaataccaaatgaatgaataaatgaataaataaacatgtatacacatatattttatcttggttaaatagataactgtgaaatattatacttaggaatagctttgacttttcaagtttttctcacttaaaatatgttctgtgtctatctagtttttattatgcagcgtgtatttaaattatattttcatttcttttcctttttgaacaaataattaggatttatttgatttagattctaaacacattttttaatggaattattattattatttttgagagggagtctcgctctgtcgcccaggctggagtgcagtggcgcgatcttggctcactgcaacctccacctcctgggttcagcctcccaagtaactgggactacaggcgcacatcacacccagctaatttttgtatttttagtagagatggggtttcaccatgttggccaggatggtctcgatctcttgaccttgtgatctgcccaccttggcctcctaaagtgctgggattacaggcgtgagccaccacaccctgccaatggaattattttaaattattcatagtatggtctaatttataacaacattagatatttgaaatattactcaaagattagaaatctccaccaagcataggaaacatttggtcaacataattttaatggcctttttagagactgtagtaataatcctcagaagccagaaattattaatagtctgagtaatgatgagagtcattctaggaatagaattagaaggtacttacaggaggccagagatctgagggacagagggtggtggagacaacggtaatcacacctctcagatatagtgtacctttttattaattcatttttttcttagtggtcagttaaagtatggtaaaaataggtggaaactcagaatttcagggtcttttactcaaatataggcctgtttatgcccagaagagaccctgaacgtagacttcagaagcattatcaatttctattttaaaagttaagtatatgtggacagctaataactcaatatttcttttcacataaagatatattttaattcaaatatgataattgaagatggaaagtaactcatgtcgtgtctactcatatatactttacatataataatctgcatagattttaaatacacaggtctctaatatttggcaaaagtatacactcatcatataagtattatgccaaatgagataaggaacattcccaccttcccaaatataaccttgtgctttttgtaatcattcatctcaaactctccgtcccaagcaaccactgagtgattttgaatattatagattagttttgcctattttagagttttatgtaagtagactcacatagtatgtacttttttgtgtctggtttcttttgctcagccaggtttctgtgtgtgtcattatttgttctgttttatttctttttatttaggatcagtattcaagtgttcaagaatcccaaagtgaggaaaagatttgaacagacattttacaaaggcagatatactaatgcccttaagtgtgtgaaaaaggatgctcagtattgctagtcatcgaggaaatgcaaattaaagccacagtgagatacagcagtacacccacttgaatggctaaaatttaaaaactggtaaaaccaggtgttggggaccaagttgtatttgcattgccgttgaggggtgtacataagacttgttcatgattattcatagcagctttattcataatagccacaaattagaatcaaatgaaatgtttctcaacaggtgattagataaatacattttgatatagttttgattttgttcttctacctgaggtttctccttggctaaagtagaaatgtgtacaattttccgaaattttgatagggaaagattattgaaataaatagccaggtctttgttaagccaaagctatgatagaatcctatttcatataattaatacattaaaaagcaggaaatttctgcgttgtgtttgtgatctagagtaagctagtagaatgtgattgaaaatgttgtccagctatattttcggcttgtgtgaaaatggctgccaactgaaatttctcttcttttttagaactgaattatctagaaaatggaatgaacttctttatcaccctggcagaaattggcaaaaactgtaaagcagtttgttttaattcatcctgtattttttcagtcttagttttcgtgttacaggttttcttattttccagatttcataagtatttaatgagattttgggaatggctttgttaaaaactattagctaaattgtaatttaaaccaaaaaacttctttggaattgtattttaactgggttattcaattcttttttctttgagacttgtcgctctgttgctcaggctggagtgcagtggcccgatctcagctcacttcaacctccgtctcctgggttcaagctattcttttgcctcagcctccctagtagctgggattccaggcatgcgccaccaagcccagcaaatttttgtattttagtgaggacggagtttcaccatgttggccaggctggtctcgaactcctgacctcaagcaatccacctacctcggcctcccaaagtgctgggattacaggtgtgagccaccatgcccagcctggttattcaattattaacagcatcacatagcaaatttttatcaatgtcatttgtattatagtgataatttttttggggggagattgttgtttatttataaatgagattaaactctatgaatatgttaaggatgatgaattaagggacctgtcaggaatactttctgagatggcagaaaattggtgagatcagaagtcagaattcttgaatcctttatgtatagtttgtatattgtaatgctgcttttccttgaaataagaatactataaatttgaaccttattcttataaatgcaacttggaggattaactgcaagtttcaagctgtttcaaattaatttaaatttgcatggaaaactcacatggtgattgtttcctaaggggactctaggaatcctgtggctacatttagacaggagagaagctaggttaaaaactgacttaaaaaaaaaattgcagtagaattatggcaggcttaattttaaacatttagaattgacattttttaatttaaatacccaaggtttatttttaccttggaaagtgtttttttgttttttaaatttatacatacaagaaatgtgttaaacctgtcattgtcttattgctgaagtgtaatcatttttgaggcaactctgcagtaaattgattatgaatcaatatcaagttgtaaagttgtttgcttttcccctgaccatcttacttccttgtttccaaaagtaaatcaagggagattaaaactaacaaacagacattagtgtgaaattgctgttaagatccaagactatatattcaaggtagattattcaaatcctcatgtaaatatacttgaagaaagaagtaataaaactattgataatctttgcctaaaaccccgtttcacaaatatttttcagtagggctccctattcaagttttctcaaaccattgacagcatgcctacaagtactgtggtgtgggacatgagtgtttgggttaggggacaacctgataatataattgttcttttgatggggagttatgaagggagggcattgtgcttgttgcataacctctaaatatggttctctaggcttccctagagattctatgagctataaagagatatttaaaaactttttatttggaaatgattttagactcacatttacaaaaatagtagagagtttcaattgtacctcccattcagctttccttaataatatcttatataaccatagtgttagtgttaactaaactacagaccttattcatatttcgccagttttaacatgcattatttgtatgtatatatgtattctatgaacctttaccacatgtgttgatacttgtaatcaccaccgcaatcagggtatagaactttctcatcatccaagagaaactttttcatgctattcctttataccatctctgcagccttggcaaccataatctgttcttcatcactataattttgccatattgagaatgttatataaatggaatcatactgttgttaaagaaaaaacttatttaaactcttgtgcaagacagtaagaccagacttaattcactactccattgaggttttgccctatgggagggagattgggctcaactcagaatataacaaggacaagtggatatttatagccaaggagcagggtgggagtcagtggatggaaaattactaagagaaaacatcaaggctggagggactcttgctagaccaactcaacaggattcttgctgaagacaggccagggtggtaaattattgagaatgggggattttcagtaaacggacttattagcaggattcttgctgacattggactaagtggaccaaggacagaacccaaggtcaaggcccagtcagaaagaggacccagaggagcctgactcaaggtttgataaaagagtctttatcagtcttaaggtgctgaattgtggccccccaacatttatatgttgaagccctaacttcctgtacttcagaatgtgaccgcatttggagatagggcctttaaagagacaattaagttaaaatgaggcttttagggtgggccctaatacaatctgattggccctaatacagtctgattgttgtcccataaaggaaattgggagacagagacaggagggctgtgagaacagaggaaagaccctgtgaggttgtagtgagaaggcagctgtcttattctggttgggctgctataacaaaaattccataaacttgagtggcttaatcctggccattttaataggcatatctaataatgttggtatctcatcacggcttcaatttgcaattccccaatggctagtgctgttgaacatcttttcatttgcttattttccaacccctatattctcactagttgagtaattgtttcttattttagttcagatgtagaacattgccagcctagagtcaaggctaggaagttgaaattggggatgggggataaagggcatttggtattagcagagaggtgggatactttagggactgtgaattgttagttcagtcacaatcaaatagccctttgaatttagttctgaaattggggtctgtccttggggttatgctttttgtgtcatgttaagaaaaatcagtgcttgagtgagatatgtattttgctagagactgttaaaatatatgaatgttattctgaagggaataggtgaactaattgctacccctttacatacttgctcatagcattaagtagctagtaaaaaaccagaatccagaagacattggattaaaggttgtctataaataagatatggaaaacgaaagtaattttgtatgtaatgttagctttgtataggagtttctttctttgttttttttttttttttttttttttgagatggagtctcactctgttgcccaggctggagtgcagtggcgcaatctcagctcactgcaacctctacctcccaggtactagtgattctcctgcctcagcctcccgagtagctgggactacaggtgcccaccaccatgcccagctatttttatatttttgtgtttttaatagagatgaggtttcactatgttggccaggctggtctcgaactcctgacctcaggtaatctgcccaccttggcctcccgaagtgctgggattacaggtgtcagtcactgtgcccgggcaggagtttcttaaatcttgaaaagctactgttgttagaagcaaatgaggctaaaagacaaagaaaataaatctcttaatgtaggttttgtagattctttggataatttttaagtgtatcctctgttgacttcaggcatttacttcaaataatcttatcttagttttaatgggactgattgtagaacatcaaaacagaaaagcttttgcatgtttttgaagatctattatcctttcatatcagattgctttttcatatagcattcataactggattttaggttatataattttagggagagtttaagagtgaacatgtgtacacacacagacacacacacaatcttcgtcgtgtcccttttcttttttctttgggtttgacatttcttctcatctgttttattgcctcttttttttaatgtgtccaaatagagatttgtactattcttaggtttctgttatatgtagcacaatggaaagcacactcagagaagcattgccatttctctggtggtcgcataacctaactatctgtccccaatttagataacaactgtgaactacctcagttctgatttcagtgtcctgacatgcttttaaagaaaatttggagtctgggcacagtggctcacacctgtaatcccaacacttcgggaggccaaggtgggaggatcacttgatcccaggagtttcagaccagcctgggcaataaagtgagacctccatctctcctacaaaaaaattaaacaattagccaggcctggaggtgcacccagctacttggggggctcaggtaagaggattgccttagcccaggatttgaggctacagtgagcaatgatagtgtcactgcatgccagcctgttcgacagagaaagaccctgcctttaaaaaaaaaaatgtgatttgttttgtttgagcagttcatttttgagagataaacctagggattgtaagtcatcatgcacctaatgatactttcatagaaaagctgctaaatgtgtgctgatattgtggcctaggtctagttttgataacttcactgtgtttaccttatctctcttccttcactaatgaagataacattgtttcattcttatgagattcctgtgtatgtgtgtgtatgttttatttctgtatatattttggacttagtaaaattgcatgggtagttgtggctgaaagggagtgaaactgaagcagtcttcttagatcactgcaacatttgggtctaatgtaggtattttaggatattaaaaacattaattttcttccttaatatgaatgtattctaagccaagtaatatgttatcaccaatttagcctttttacatatgagatgaatgaaatactggcatttgaggtttctttttgtttgtgacagaggaggaagtaagattataaatttgccaacaattggactaaatgaagttggaagtaaagtgagaaaactttccatttttggggggggttgggtaagttatataattactttcatgaaaggaatttgtttagattctactgaaaatggcaaaggaggaaatttcaaaacaggatatgtatgtggaaatactaagaattgtattcatatttttcttcgaagtcagaagactgaagggcattgaatgagaaatctgggaggcaggagttcagttctacttgttctgtgacgggcactattaaacctaaaaagagtggacacttaatagcttctcagaaaatgtacaaaaagaaaatctgtttgccttgattatagccaattagcaagtgaagtgtttgcactttaaaaaaagtccttagtgttattatggcattaaaataaaatttttatattttccattttaatgttaagaatatgacagttaaaaatagttttgagaagaatttctgtaattcacaggttaacatgatcatatgttcagatttttctttttaagaccttatatacctcacaggatgttaagcttttaaaaaaattcctgtagaacattgaagaactgagtagtcctttgtcatctacatagcaggcagtcaaatatttgtttctttgatctgaaaactaaattttgctgtagttaagctgtattagcagaatgcccaaaggctagtctaactccatatcataatctaaacaggaacatttactagaagcagttaggacttttagttcacaatacaagtaatacagctttttctaaattctaccattagtacttgcaggtacctgctaaatcaggagttgacacactaaagccattcaagccaaatatagccagctgcttattttgtaaataaaattttattggaacacagtcatgcctattcgttatgtattgtgtatggtttcagtggcagtgttaaatagttgtgacagagatcctgtggccttcacagctaaaacatttactatcacattgccaaccccagtgctaaatgatggcatgaaaaaaatgtatataaacctttgttctattttattttattttaattattattatactttaagttttagggtacatgtgcacaatgtgcaggttagttacatatgtatacatgtgccatgctggtgtgctgcacccattaacgcgtcatttagtattaggtatatctcctaatgctatccctcccccctccccccatcccacaacagtccccagagtgtgatgttccccttcctgtgttctattttaaatagtgttgaaagactagaacacttttaaaaaaatcaaactattgctcttactgaaaggaagcagagcacatattttgtccactttcggaatccttaggggagcaatttgttcccttgagtatgaagcagaagttactaaacaaacttgactttaactgcagttacattataaccttaaagagctggccagaagtttcaatggttgaataaaggtgaaaaactagtgtctttacagaagttagtggttaaattattcaagacactcaaaacagacatttaaaaccatttctctacatattttatttggtttacagtgtgtagcaacttatttcacttgttttatggtataaaagtcattcaaatttcctaaagcttgaatgaggccattatgtggcatatctagaaagacttgggtttgaatcctgctttctccacttaatagttatgtgggacaagcaacttctctgttccctgtttttttttttttttttgagacagagtttcgctcttgttgcccaggctggagtgcagtggcgcaatctcagctcacggcaacctctgccttccaggttcaagcgattctcctgcctcagcctccctggcagctgggattacaagcgtgcgccaccatgcccaactaattttgtatttttagtagagacggggtttctccatgttggtcaggctgggtcttgaactcctgacctcaggtgatctacccgcctcggcctcctaaagtgttgggattacaagtgtgagccaccatgcgcagacttcctgagtttttaaatatgtaaaatgtacaaggtctacttcatagggtggttgggttaacacatgtaaagcacttagaacagtaccttgcatggttatactgataaccatgttatcagtatggtttgcttttataatgctttattgaaactcctccagtcacaaggtggcagcttttgttgaaagccatgtaattgattaaagccttaaaaaaaaaatctcaagaatttgccctgaaaagccccagttttttttctgtaacaccaataattgacaagtgatgccattcatgaggtatcagaattgaaaaccaatcaaggaagttacgtttctgaagtaacatggaagttacccatatagtaaaatcaattttaattattgagtaaaagttaattgaagcacatttcttttaatctcttgatttattttttttctttcgcttgactgccttctgccatttaactatcttcctccaccagcttgggtttctgaaagtgtagtgtattttttaatatatcagaatcctgggtctctgctctctctctcttttttacttttcttttcttttttttcttgcgacagggccttgctctgtcccccaggctggatggcacaatcttggctcactacaacctctgcctcctgggctcaagtgatcctcccaccccagcctccgagtagctgggactacaggcacatgccaccatactcagctgatttttgtatttttttttttgtttttgtagatatggagtcttgccatgttgcccaggctggtcttgaactcctagcctcaagtgatccacccacctcagcctccgaaagtgctgggattataggcactaggcggcatgcctgggccctctactctgttctgaataaaaagtctctggggatggaccctaggtgattcataggcacactgaaatctgagaaccaggtacaggaaataaaattatttgaaatgcaaaccattgaattttatgactttttcattgcttttggtaagaggctggactgtggaggagatgaaaacttgaccaaaaatggatttctgtgagcaccacagaatttggtgaggtttagtaggactccggaggaataacattcgggaaggacaggatgtctgaactgtatgaccagtcctgtcctttttgctgttctctccctgagactcttttttcacctggatgattccttccccttttaacccccagccaaaactgtgcttacagtgatcaggcaacagcctgatcattccaaaggaaattttgaaactgaggagaaacaaatacttaaaagaagaaacatcataaaagtatggacttctgaaatatgggcttctgctcctaagatcctgttgaagggactgaagaatttattgagcctcagttctctttctgctagtacctgatgagctggtgtaacctgcctggctgaactttgcccccagtcttcatctcatgggtaccttcttatttattgccacattgaggccatctattgtcaaagataaacataaccagacatttgttaaagtggtacaaacagattttattcagtaagtactgatagtacgggaaagagctgagctcattccaatgtgcacaggtggtttgggcattttaaagggtgtttattcttttaatgcaccaatggggtatattatgttttttgagtgtagtcactgatcatttttaaatttggaatcctctacagctgatgcttgatttgccttgtcagcatttgccaaattacattcagaggctaggaaaattatgccatccccttttcgttgataaaattagttctacattcagcttgcaagttttaaataatttcttctcccatctcctctttttgttctgttaccgtcttctcttttcctgtttatctcttccttggattcattccctcctcttgtgttttaggatgaggaggctaatattagattttagggattttgcttagtttgccaacagtggtattgactgggttgtaatttttaaaaaccactgggacagcttggttttagatgaagaggatttcagtgagtaaaggtatgaataaaccacaccatatcttataaatcctcataaagtcgctaagtctctttcagaacataatgtgatttgtcagttgtcacactttgtgaactgcagatgccatcaatcatgagagagagaaattcctatttaaatgtttgattatttgtcttcagaaaatgtgattttcaactattttagtcacaaaccttataagcaataatgaattggactcccattggtagtcctgaacactggggagtgttcatgagtgaaatacagactgatttaacttagttggatgctgcttacctagctcttaaggctttaaaagttgtgcattaggctggaatgttgatatgcgaaggatttgtaaagaaatatatttctagttagtgcatttcatgtaaagatttaacccttttttgttgttgtgataaacagatttattttcccgaaaatggacattttctctatagattattttcttttatttaattaaattgcatatgccccaggagtctcatgggtatgtacacacttaataaatattattttgtagtttggttttgaaattggaacaaagtgcttactacttaagattctctctttcttgtcactgcagtgttaatagaacataattacataccttatataaaaacttggtgtattagtccattcttgcattgctataaggaaatactcgagactgggtaatttataaagaaaagaggtttaattggctcatggttccacaggctgtacaggaagcgtggcaacatctgcttctggggaggcatcagggagcttttactcatggcagaaggcaaaacaggagtaggtgtcttacatggcaggagcaggagcaaggagaggggcaggcactggacacttaaacaactagatctcaagaaaactcagtcactgttacaagagcagcgccaagggcattgtggtaaaccattcatgagaaatccacttgcatgacccagtgacctctcaccaggttccacctccaacaatggggactacagtttggcatgagagttgatagggacacagatccaaatcatatccctaggtattctattttgcttagagactatcattatttctccctacctttattcactcattctttgtcatcttccattactctgttttcacctggtgggctctctatgtgctcctgctcaaactttctctcctactctttacttagcacagagctgaggtgacagaggtaaaatcatagagtgacacaggaacaaaaagtttttttgaggagggagtaagacctagatctcattttcagtatagaattttatgagataaagtgattgagagattatctgtacattaacaactaacaaagatccttgggaaggattcctttttttttttttttttttttaagacagggtcttactctgtcattcaggctggagtgcaaaggtgcgatcttggctcactgcagcctcgaactcctgggctcaagcgttcctcctacctagcctctcgagtagctaggacgaaaggcaggtagcaccacgcctggctaatttttgtatatctggtagggatggggtttcaccatgttgcccaggctggttttgaactcaagtgatctgcctgccttagcttccccaaatgctggaattacaggcatgagccaccctgcctggacaggaaagattttaaagtacattctttccctgaatcctactccatagttacatggttattggtcactgaaagaggaagttagatttttcccaacaacattttaaaattatggtttaaaaaaatcagttttcaactttgaaacattttctgtgtcgtcttttgtttaaaagaatcaactaaaaatccattagatatttttctcaaatatataatttgttcttttagatttttttaaaacctcataaatgtaaaattcactttttaatattgtatctgtgatgagttttctctgcaacaatgtttagctttacaaattctgctactttaaaacaaaacatacttcaaggaattgttactgtttgtggctgggtttacatactcttgaatctgagggactgttatgaaaggaaatgaaaagatggaaaattgttgctaaaaataatatataggaagtgctttactggctcttacatcttcaataaagagctgatggcttctgaaatgaccagctttgatgaatgtgattatactttaaaattaaggtattttagaaatcatctcaaatctgaatattggtacataagaagttatattacctaagcattaagggaaatggaatacatttaaatactcttggaaagacttagtttaaaaagatcaatttctgaaacttggagaattttatggagtctatttaaagacaatgttcatttatgtgggcagaaaaccatactatctccagggggagggtggtctctgtttctctaggtttattccccaagttcatgaattgtgcatgtagttttcggcattttttttttctttttttttgggggaaacggagtctctctcttgtgcccaggctggagtgcagtagtgtgatctcggctcactgcaacctccgcctctggggttcaagtgattctcctgcctcagcctcccgagtagcggccatgttggccaggctggtctggaactcctaccctcaagtgatctgctcacctcggcctcccaaagtgttgggattacagagtgggccaccgtgcctgttcctagtgtttgagctttttaaggaaatgttgcatcttaggatagaaatcacttagtcactattgggtttttgaggagttcagcagtcataacttggatttattacattgtttagatgaaactctttattatttaaaaacatttttagtcatggtcactttggctttgggtttgtggttgaagactttagatattttgtctttttagtggaattggcagtattgtatagaaaaacttaaatatgcattttaccttttttatttaattgaatctaaccttggaaaacctttctgtttctgagcgttctctgtattctggccagtagtttgaattattttactacctttgctctgtgttgagagggttggactgtcatgagctttgagtagaggtactctgtttttttttttttttttttttttttttttgagacagagtcttgctctgtcacccaggctggagtgtagtggcaccatcacggctcactgcaaactttgccttctgggttctagcaattctcctgcctcagcctcccgagtagctgagattacaggcacccgccaccacgcccagctactttttgtattttagtagagatggggttttgccatgttgatcaggctggtctcaaactcctgacctcaagcaatccaccctccttggcctcccgaagtgccgatattacaggcctgagccaccgtgcctggccgaggtgttcttttttaatgttaaacttaggtaaaatatgttatttcagattatgtaaaatatgtttaaagcacatgcccaaattttaattttcatgcatcaaaaacactgaaattgacatccagaattttttgaagcattttaataaggctaataattagattattaattcagaattcaggcttacttcctgaattaatttaaagtggaagactttggagtggttactgctcatttaaaaatattataaattacatgtatatgcatataaataaatatttgttcgcgtttttctgttgactagagtaatatatgttcttttcggaaatttcagaagatacagaaaagtaccaataagaaaattaaaactattgagaatcccatcatgtagaagtaaccaccatttacattctggcaaataagctgttcattaccttttctagctcaaattgtattatattttatttttaggaggaccttttatttttttcttttccttttttcccccagacaccagtgttacttgccaacaggaagacattttaaatccacattttctttctgtttatttatttttattttttatttcttttcaagacagagtcttgctctgtcgcttaggctgcagtgttatagtgtgatcatagctcactgtaaccttgagttcctgggctcaagcatacatccacattttcaaccaagaatcctgtaaacagtcttgattatttgttgagagcaagagagacatatattaaaaagaattagaagttaatacctggtttaggatcatattcctctctaatttcctcttttgagaaagtaattgtagttgtttgtagatagctgattaactttgaagcatatacatatattcctctgtgcccatgactgaagagttttctttgggtttcaagctctgcagtattctcactaacccagtcttcatgaaatcttttgacattgagggaatacctttgacttttgactggcagcactgtgaaccattccatcagctaacaaggttttacagtaactgtctgttgaccaaattaaattgcttcccaggagtcttgttctctgtgaagctgtctctgtctaaatcttttccctatagaatttcctacagacaaatcttgaagtaagacctttatgtttgccatttaaacagcaaaattcaaacaatgccctggtgcaaaataagtatagcagaacagaaattatgctgatttggcataaacagtatcagatcctctcattgaaccatcatgaatgtctgcatctctgacttagcaactgtgaaagctattgaactataggttactatttattgcttgctgaagtcaaatgcattgtttgtcatttaataagagtcagtgacgttgtgctgattgtcactagataggtcccattgctcatcaatgtgtgaatgtgtataggttgttcacaactctgtgcattctttcattgtcaagcataatttaaagagaagcccaatcaagaagataacccccttgctagctgccagagctgtagctctcttgtctatgacttgttcattctgccagacttaatggttcagaccttttttccccgctagctttttagagcttaccagggaaattgtaataaattcagtgagaggaaatgagccagtacattaacatttttcttttttttctttttatttgctttttcatactgaaaataatggtctttttctaagggaggcaatagcaagtgatagtatgtaaatggttttggttttcatcaacattttttttgaactaagcagttaaggaacagtggtcacataaatacacctaccattctgtacagacatggtttctgcttttacaagtgttatatggtattttcaaaaaggcaaaatcacttaagtcgggaaattaatgaggaaatcattaagatattatgactgcctcaaagaacatttgaaaagttaggcatacacaagcagtttgtcaaataaatgtttctggattagaaggaaaatttgttaatgcccaagtcagccatcattctttgtagatatctattccaccagacagaaattatttgcatctcaattagttggaaatctgcaagttaacaggcaattcagtaagtctgagactttaatcaaaggtaaactgtgtggtgcattgagtacttttgcttggagtgccttttgcctccccatataatattaaaaagatgtacccagttgttttttatatttctaaagttttggaaatattttctgatataagcaggaaaagaaaaaaaaataggacataatgttttcctttactaacaagaaacaagaaaatgaagaggaacatattaggaaaaaggatggatttggcaagaaagttttactttggtaatgtttcatgtaaaaaactaaatacatttcatattatttctataataaacaacttcttcctttttctcctggtctgtaattaggtgcttctccacctaagtggaaaaggttaacttgattgaattcatgtcttagggcctctgtttgtcccacaactgagtgggatgaactcttagtagaactgtgatctagttagttaacattgtagcagatgacttactgagtcattttctattttggttcatttgtgagacacagctcatggcacagggaaggatatacaaagtattcaatgaataattaataggaatatgtgctataggaatttacaagaagaaggggactgagatgaagatgctaaaaatgtaaataattatgcaaaacagcagatgggtaagggcccaaaggactagagaattatggtcaggaagcattttttttctccagggaggcaaacttgctgcagcaccaatcctccttttgtcacctaatttaatcatggtggtatttttttggttctgtcattgttgtagtaattttacttggtggtgccattaaaagttaatttaaatggaatttttattgtaaattggcagtttataattatacaaagttatgggtcacaaagttatgttataatttatgaatacaatgtggaataatgaaatcaagctagttaatatgtctgtcacctcattggaatttactcttagcaagttttgaaatgtgcaataccctgttattaactatattcatcatgctgtgcaagaggactcaaagaaaaaaaaaatttctcttaactgatattttgtaccctttgatcatcatctccttataactcccactcccccagcctctgtaactaccttctattctctgcttctgagttcgattattttagattccccatgtgagaacagatgactttttttcacttatcatgttctctaattccatccatattgttgcagacaacagaacacccttctttttgtaaggctgaatagtactctattgtgtatacataccatattttctttatcctttcacctgttgatagatacttaggttgattccataatttagctattgtgaatagtgcttcagtggacatgggagtgcagatacctcctcagcctactgatttcaaatcttttgggtaagtacccagaagtaggattgctggattttgtggtaattctatttttagttttttgaggaatccttgtaacattttccatatttgctgtattagtttacattcctgccaacggtttacaagtgttcccttttactccatgcccttgccaccacttaatccttcatctttttgataaaagccattctggcaggtgtgagatggtatctcattgtggttttgatttttcattttcctaataattagtgaagttgaacattttttaaaaaatgtgtcttttggccatttgcgtgtctgctcttgacaaataatgtctattctggtcccttgcccatttttaaactggattttttttggtttgttttcttgctattgagttgtttgagcttcttatgcattttggatgttaaacccttatcaggcgtaacacttggaaatattttctcccaattcataggttgtctctgcatattgttgtttccttggctgtgtagaagctttttagtttgatgtaatcccagttgtctgttttgcatttgttgcctgtgcttttggggtcaaattaaaaaaaaaagtgattgcctagatcaatgtcatgtagtttttcccatatgttgtcttctagtagttttagagtttctggtcttatgtttaagtctttaattcattttgagttgatttttatatatggtgtgagataagggtccaagttcattcttctgcatgtggaaatccagttttcccagcaccatttgttgaatagaccgtccttttcccattgtatatttttgacacctttgttttaaatcagttggctgcacttgtgcaggtttatttctgggctctgtatttggccaatttttattggccaaaattacttatatatttaaaaatttgggtgattcaaacacctctcaaagtatatatgttggtggctagacataatcctgtgtagtcttatggtaggcagctacttaaatatgtatttcctaaaagaatcatttgagtagaataaaaattatggtattataggctgggcgcggtagctcatgcctgtaatcccagcactttggaaggccgaggcgggcggatcactaggtcaagagttcgagaccagcctgacgaacatactgaaaccccgtctctactaaaaatataaaaattagctgtgtgtagtggcgcacgcctgtaatcccagctacttgggaggctggggcagaagaatcgcttgaacctgggaggcagaggttgcagtgagccgagatcgtaccactgcattccagcctgggtgacagggcgagattccatctcaaaaaaaaaaaaaaaaattatggtattataatgtctatgttaaatttgtttcgttacttgtaggaatggcaaagttgtgacaaagcagaagagttcatagatacatgtttgttttacaagggcattttatgtgttttagcagaaaggttaacattttgactgatatatttacgaaggttataagaaggaaaagctaaaattaatatttcacaattctaattgcttttgcttggctcctctctgcatagtatgtattctggtttttaaatatttaaaatttcatctcctctggtgtaaagtggaaatgaaataatttggggtggcagatttttgttaatgatagtctccttgctccttttttaaagcagagtaatgctcatgttgtatctttctagcattaagaaaaattatttgctgaaatgacaatttcttaagcagtaacaacgtctagagagtgaacatttataacatgctactttgtgttgtgtgatagatataattgataattctgctttttcctgttgactaatttctaactgtcatgatatatatctttctgaagtattatttttggtaggttcaggcagattgcagaaaggcaggtatctttgtttgccaacattctcgtataatcatggattgttagaagtggaagggattcagaatgattctagggtatctcttcattttcatagttgaagaaactgagaccctatcaggggacagagttaggagaggggtgtgtgtgtgtgtatatgagtacgtaacaaaatcatgggttcctactgatatcttcagttctaaccttgcatcttggagttgtttgtaaatacctcctttggcagtaacatagcacccattatcctcaatatattttatttgcacaatcaaaaataattttctgtatgtagacctcccaattacactgctatcttcattgtttatcacctctaggccatctttgttcctttgccactgcacctgttgccctgggcctgtgcacacccccaaccctttctcactgccctgtgtccttagctacctcagccactatgctgattcctgaatactggagacaaaagggaaggcaagatgaaaagggaaggttatacttctttattaattcacatagattacccttggctctgcctgccacattttcatgagaatttcttttatttttcagattcctctctttatagtagcctgagaatctctaggtagttactcattcttagaattggtcctggttactattttcacagaagagaaacatgaaaatctgattaccaaaggggttgtgcttcctgcagttcagtgtagtctttgtccactagaaggaagaacattgttctcccagcagcctgacacaccacagtaatgtatgtgtatgctgccattgctggttcagcatttatttctgttggtggagtgaggctcagccatggtctttctagttctgtagttacagcttcttcagaatacacagacacacaaagccatttcttggtaattcactctgaggagtaaatacttcctcagagccaggggattggttgggaggagtttgcagttctagacagccagatagcattgtttctgaaaagacgtcttgtaaaactttagcattctggcccttgagcatagaacagtcctttctgttctcaaatctattgtcttaagccttttcctacctcaggatcatgagtaactgttttttttgttttttttttttttagaagtaatagaaaacttgcctcagaatagcttcaataagaaaggaaatgaatgtgctcagataactggcagaattcactgatagcatgggcataggcctggcacacgccacttctttttttttttttttgagacagtcttgctctgtcacccaggctggagtgtagtggcaccatcacggctcactgcaacctgtgctttttgggttcaagcagttctcttgcctcagcctccccagtagctgagattacaggcacccgccaccatgcctggggctgctttcctagatacacagaaaacaaggtggataggtgagaagcactagaaatatccattcagttattagtggggattaggttcagggctgttgtttaaggagcccttaaactttaaatttcaacacaggaatggaggtccctgtgtaaggattgggaatgggacctaataactgctccctcaaggtgagttgcgagtcagctggccatctccatctcccatgcattaccttgatgtaccttccagtccaccatctgcttgtgcaccaggctgcacctactgttccatgatggaagggaaggtagaagttgggctggaaggagatgttggtccagatctgggtacatttacccttgtggtacctcttgggagcaagaaagtccaggccctggagccttccactgacaactcttgaaggcccacctcaactgaagcctcactgatagcactttcatgagatgctggtcagggaagagcttctgatttggcctaggctagtggcagtgccaccaggcaattgcttaaaatcttctttctgccaaattctgtgatgtattaaagtatgcgatacatgaaaattgagagtggctttggttttgttgtaggtctggatctatttacctttattaagctctggagactgacatatgatatttttagatgtatgagtgcagatttatggagatattggttctggatttagtatgagatgctaaacctggtccccattgttctcaaggagatgattacagaagtgacacacatatgaaacaattgaagaacaaagtaacacctctgtggcaattattattaaagttattagagattcagagatcagatccttctggtgcaaagctaagagatgggtattaagctattcctgaagacgagccaaatatgggtagttggagaggaaaaggaaggcaggcattcctgagagaatgagcatgggtaggaaggtgtgatgaatgaaataaacagtgggagataatgatcacattgatttaattgaagcagaatctattaggagcatagaaataaacttgactagggtaagataccgtaatagaaggctgtagaagtgaggcagagtaaatttgtatactgggaatatggtatttgtggaactattaaaatcaagcttgtcagcaatagtttctttaagtatagaaagaagttatctttcacatgattcattccaaattgaagaaatgttagagaattaggaaaatcttctactttctcatcaaaatgaccaaaaccacaaaaacatgtatgtatgctttgataattaattgaaggaaaattctgtatttgggatgcataaccttttgtttttggtattatcctaatagagagaaaaatattcccaggcttccaagagtaaatttgagggtagttcattttggagtgtttatgagtatttgctttatttacttctggaaaatgaaataaccaaatcaacactcagtttttgaaagtaaatttgaaagaatataaaaatattgccttcaaatgtgtagcatgcactttctccagtgccgatctttatttattaagacaatgttgtatagaacattttccagagaaatgttattaaggcatgttcctgacaagtgattttaatcaaaatagattaatttaaaatgcaaccatttttataagatattttaattttcaaatcagcaaggatttcacagtaatgtaatgaaaatggaatattcctttaaagtttgtaggttttttgaggcatcaacatagtttttgagggtgagagtaggattggcagggggaggcagttcaaaggaatgcattgttaatggaataccaaactctgtaatacattttaaagagctttattcagagccaatatgagtgagcatggcccagggaagcacagtctcaagaggtcctaagaaagtgcacgcagggcagtcagattatagtttgagtttttacattttagggagacaggagttaataagcaaattcataaattgatacatggaggttatacattggtttggcccaaaaggtgggatatcttgaagcagggacttacaggtcataggtgggttcagagatttttaaatttgcaatcagttaaagagtaaagctttgtctaaaaatttggagttggcagaaaggaatgtttaagataaaaaagttgttaaccattacactcggtcagcatgacttataggggtgcataacttagcccttgtctggtgtgacattaggtcctatttataatttggtatcttattgccacaaagagtctgtattgtcagtcttatgatctctgttttaacattaatgctggtcagttgtgcctaaacctcaaaggaaggggatgtaaggaggtgtgtctgacctcccttctcatcacggccaagaactcagttttgtaggtttctctggggtcctcttggccaagggggagtctattcagacagatggggagcttaggatttttagcttacagcactttgcctaacaacatttgtgagaatataaggttggaattgtatgaaatttttttaaaacaatctttaaatcaaattgaggtttatgtttcattttgatcagggattaatttggaaagtaaaaataaagggttgctatacatgtaaatttctatctaagagatgactatttagccctaggtgcagaatttgaatcaaagaattatgatcaaataatttctcattaaattggcaaacatttgctaggaaaagtctttaaacagttctcttgaacaattaaaattactttattgttcttaggcccgactctaaacatgagaaactaaatcttctccttgtaaggagaataaaatggcaaaatgtgtcaggattattcaattattttatgtaaatacatcccatttactttgaggagactcatcataccttttaaaatgagatcaatcaacacccttcttagagttgatttcattgagctaatgaacaggtatttttattcttgaaatattgcatttttattcttcttattaatggccttccctgtgtatgaataaataaatcatttcactgctagtagctctaagtgctttcaagcatttaagtgcttgtaattactaagcaaaggagtactatagattaaatgtgttgtaaactacacatgaaagcaatgtcttttttattatctgtaactttaatggaaagaaaatgttaatttagggtaatgaaatagacctccaagtatgatcagtgaatagaccattaggttaattaaaatgaggatatgtgtcactgttgtggtggaactaccatggtggagaagacagattcatttagtgcttgaatagtaaaattcagactgtgtcactctcaacctagactgactacacaaaggaacaagattaatgacaaaggtaactcagttttgtttcatttacttttgcctgtcacattacttgttattctagagagcctgtcccttaaaggtgaaaatttatacaatctttaagaaaaccaactaaatataaattttgttactttattatctgtcatcccaggtgaatcaaacaccaaaacaagatttaagtaacagtaagttaatagtaacgtatacagattttataacataacactcataaagctagcaactttatagatttgtaaaaaggcagttgaaatgaccactgcagcttaatagttaatagttctttttggtgtctagtactcagaaacctgttggaaactaattttgtgtagtttgatatccattggccaaattaccatttgaatttactaaagaattcattgcttcactactgtgccatagtttataaaggactttttgagtgctctttgattcttgtctctgaagaatcttagcataatgccaacatagtgccaaccataatagttttccagttaagtacttcctatttctatctaaaaggcttggcatgtgtttaaacaaatattaagttcagtatgctcttgagattctcagtttcccctgtcatatggctaatttaacgtgttagtatctatttgggttttagatttagaattactacatctggcccgttagccaagctagccatcattggtagctttttgtttgtgatatgaagcatgaatgcatgcagtaagtgatttataaagcacgtgctttccctaatgatttatatgatcaatcagtcaaatatttattgaattctagttctgagtccagtattgtagtaggtacttaaggcttgcatatactatagtatactgtactttatacttcattcagttcattacagaatctgcatatgtttataaaagaattgtttctttccttagctttacaagtaagaaaactttttaggaaggtaagattctcttcctcttttgttttagcctcttgattctgggaaatgttttcttatccttgccttatttctctattttcctgaaatttaccctgatgatatttagtaggagctatttaatgagtttatgtgtatttaatgtttttgatgatgcatgaatgttaccttataactaagattgatatagtaaaatttgtttattttttttaatttttttttttgagacaaagtctcactctgttgaccaggctagaatgcagtggtgtgacctgggctcaatgcagcctcctcctcctgggttcaagcaattcttctgcctcagcctcctgagtagctgggattacaggtgcccaccaccatgcttggctaatttttgtacttttagtagagatgagatttcactgtgtcggccaggctggtctcgaaaccctgacctcaagtgatctaccacctcagcctctcaaagtgctaggattacaggtgtgagccaccgcatctagcctgatacagtaacattgtaatacttatgttaggaagtgaatctttattcgataattgattcaccataaaatttttctgaagaattgacttagaacatttcacaggtctcattttgtcccacttttttcatttaaggctcattccagcatttaaagaaaaggaaagaattgtaaagattcttaataggtccagaaagctgtagcagtgaaggcaatgctagagtatgaaaactctcatgaatttatccataggccacgtgatatcctttgatgtatctgttctgtgtgtgtgtgtgtctgcttttttctaactacatactggcttgctcatttcctttcttttttttttcattatactttagttttagggtacatgtgcactacgtgcaggttaattacatatgtatacatgtgccatgttggtgtgctgaacccagtaactcgtcatttaacattaggtatatctccaaatgctatccctccccacttccctcaccccacaacaggccctggtgtgtgatgttcccattcctgtgtctatgtgttctcattgttcaattcccacctatgagtgaggacatgtggtgtttggttttttgtccttgcaatagtttgctgagaatgatggtttccagcttcatccatgtccctacaaaggacatgaactcatcattttttatggctgcatagtattccctggtatatatgtgccacattttcttaatccagtctatcattgttggacatttgggttggttccaagtctttgctattgtgaatagtgctgcaataaacatacgtgtgcatgtgtctttatagcagcatgatttataatcctttgggtatatacccagtaatgggatggctgggtcaaatggtatttctagttctaactgggtcaaatggtatttctagttctagatccctgaggaatcaccacactgacatccacaatggttgaactagtttacattcccaccaacagtgtaaaagtgttcctatttctccacatcctctccagcgtctgttgtttcctgactttttaatgatcgccattctaactggtgtgagatggtatctcattgtggttttgatttgcatttctctgatggccagtgatgatgagcattttttcatgtgttttttggctgcataaatgtcttcttttgagaagtgtctgttcatatccgttgcccactttttgatgggattgtttgtttttttcttgtaaatttgtttgagttcattgtagattctggatattagtcctttgtcagatgaatagattgcaaaaattttctcccattctgtaggttgcctgttcactctgatggtagtttcttttgctgtgcagaagctctttagtttaattagatcccatttgtcaattttggcttttgttgccattgcttttggtgttttagacatgaagtccttgcccttgcctatgtcctgaatggtattgcctaggttttcttctagggtttgtatggttttagatctaacatttaagtctttaatccatcttgaattaattttagtataaggtgtaaggaagggatccagtttcagctttctacatacgggtagccagttttcccagcaccatttattaaatagggaatcctttccccatttcttgtttttatcaggtttgtcaaagatcagatggttgtagatatgcggcattatttctgagggctctgttctgttccattggtctatatctctcttttgataccaataccatgctgttttggttactgtagccttgtagtatagtttgaagtcaggcagcgtgatgcctccagctttgttcttttggcttaggattgactttgcaatgcgggctctcttttggttccatatgaactttaaggtagttttttccaattctgtgaagaaagtcattggtagcttgatgggaatggcattgaatctataaattaccttgcgcagtaaggccattttcacaatattgattcttcctacccatgagcatggaatgttcttccatttgtttgtatcctcttttatttcattgagtagtggtttgtagttctcctcgaagaggtccttcacatcccttgtaagttggattcctaggtattttattctctttgaagcaattgtgaatgggagttcactcatgatttcgctctctgtttgtctgttattggtgtataagaatgcttgtgatttttgcacattgattttgtaccctgagactttgctgaagttgcctatcagcttaaggagatttggggctgagacaatggggttttctagatatataatcatgttatctgcaaacagggacaatttgacttcctcttttcctaattgaataccctttatttccttctcctgcctaattgccctggccagaacatccaacactatgttgaataggagtggtgagagagggcatccctgtcttctgccagttttcaaagggaatgcttccagtttttgcccattcagtatgatattggctgtgggtttgtcatagatagctcttattttgagatacgtcccatcaatacctaatttattgagagtttttagcatgaagtgttgttgaattttgtcaaaggccttttctgcatttattgaaataatcatgtggtttttgtcgttggttctgtttatatgctggattacgtttattgattttcgtgtgttgaaccagccttgcatcccagggatgaaacccacttgatcatggtggataagctttttgatgtactgctggatttggtttgccagtattttattgaggatttttgcattgatgttcatcagggatatcggtctaaaattctctttgtttgttgtgtccctgctaggcttttgtatcaggatgatgctgatctcataaaatgagttagggaggattccctctttttctattgattggactagtttcagaaggaatggtaccagctcctccttttacctctggtagaactcggctgtgaatccatctggtcctggactttttttggttggtaagctattaattattgcctcaatttcagagcctgttattggtctattcagagattcaacttcttccttgtttagtcttgggagagtgtatgtgtccaggaatttatccatttcttctagattttctagtttatttgtgtagaggtgtttatagtattctctgatggtagtttgtatttctgtggaattggcggtgatatcccctttatcattttttattgcgtcgatttgattcttctctcttttcttctttattagtcttgctagtggtctatcaattttgttgaccttttcaaaaaaccaggtcctggattcactgattttttgaagggttttttgtgtctctgtttccttcagttctgctctgatcttagttatttcttgccttctgctagcttttgaatgtgtttgctcttgcttctctagttcttttaattgtgatgttagggtgtccattttagatctttcctgctttctcttgtgggcatttagtgctataaatttccctctacacactgctttgaatgtgtcccagagattctggtatgttgtgtgtttgttctcgttggtttcaaagaacatctttatttctgccttcatttcgttatgtacccagtagtcattcaggagcaggttgttcagtttccatgtagttgagcagttttgagtgagtttcttaatcctgtgttctagtttgattgcactgtggtctgagagacagtttgttacaatttctgttcttttacatttgctgaggagtgctttacttccaactatgtggtccattttggaataagtgaggtgtggtgctgagaagaatgtatattctgttgatgtggggtggagagttctgtagttgtctattaggtccacttggtgcagagctgagttcaattcctggatatccttgttaactttctgtctcgttgatctgtctaatgttgacagtggggtgttaaagtctcccagtattattgtgtggtagtctaagtctctttgtaggtcactcaggacttgctttacgaatctgggtgctcctgtattgggtgcatatatatttaggatagttagctcttcttgttgaattgatccctttaccattatgtaatggccttctttgtctcttttgatctttgttggtgtaaagtctgttttatcagagactaggattgcaacccctgcctttttttcttttccatttgctcggtagatcttcctccatccttttattttgagcctatgtgtgtctctgcacgtgagatgggtttcctgaatacagcacactgatgggtcttgactctttatccaatttgccagtctgtgtcttttaattggagcatttagtccatttacatttaaagttaatattgttatgtgtgaatttgatcctgtcattatgatgttagctggttattgtgctcgttagttgatgcagtttcttcctagtctcgatggtctttacattttggcatgattttgcagcggctggtaccggttgtttctttccatgtttagcacttccttcaggagctcttttagggcaggcctggtggtgacaaaatctctcagcatttgcttgtctgtaaagtattttatttctccttcacttatgaagcttagtttggctggatatgaaattctgggttgaaaattcttttctttaagaatgttgaatatcggcccccactctcttctggcttgtagagtttctgccgagagatctgctgttaagtctgatgggcttccctttgtgggtaacccgacctttctctctggctgcccttaacattttttccttcatttcaactttggtgaatctgacaattatgtgtcttagagttgctcttctcgaggagtatctttgtggcgttctctgtgtttcctgaatttgaatgttggccttccttgctagattggggaagttctcctgggtaatatcctgcagagtgttttccaacttggttccattctctccatcactttcagttacaccaatcagacatagatttggtcttttcacatagtcccatatttcttggaggctttgttcgtttctttttattcttttttctctaaacttctcttcttgcttcattttattcatttgattttccatcactgataccctttcttccagttgattgaatgggctactgaggcttgtgcattcgtcacgtagttctcgtgcattggttttcaccaccatcaggtcctttaagaacttctctgcattggttattctagttagccattcgtctagttttttttcaaggtttttaacttctttgccatgggttagaacttcctccttcagctcagagtagtttgatcatctgaagacttcttctctcaactcatcaaagtcattctccatccagctttgttccgttgctggtgaggagctgcgttcctttggaggaggagaggcactcgatttttagagtttccagtttttctgctctgttttttccccatctttgtggttttatctacctttggcctttgatgatggtgacgtacagatggggttttggtgtggatattctttctgtttgttagttttccttctaacggtcaggaccctcagctgcaggtctgttggagtttgctggaggtccactccagaccctgtttgcctgggtatcagcagcggaagctgcagaacagcagatattggtgagcagcaaatgttcctgcctgattgttcctctggaagttttgtctcagaggagtagtcggctgtgtgaggtgtcagtctgcccctactgggaggtgcctcccagttaggctacttgggggtcagggacccacttgaggaggcagtctgtctgttctcagatctccagctgcgtgctgggagaaccactactctcttcaaagctgtcagacagggacatttaagtctgcagaggattctgctgccttctgtttggcaatgcgctgcctccagaggtggagtctgcagaggcaggcaggcctccttgagctgtggtgggctccacccagttggagcttcctggcccctttgtttacctactcaagccttggcaatggcggtcaccccttccccaggctcgctgctcctttgctgtttgatctcagactgctgtgctaacaatgagtgaggctctgtgggtgtaggacccccgagccatgcgcagcatatagtctcctggtgtgccgtttgctatgaccattgtaaaagtgcagtattggggtgggagtgaaccaattttccaggtgctgtctgtcacccctttctttgactacgaaagggaattccctgaccccttgcacttcccgggtgaggcaatgcctggccctgcctcggctcacgcacagtgtgctgcacccactgtcctgcacccactttccgacactcaccagtgagatgaacccggtacctcagttggaaatgcagaaatcacccgtcttctgctttgctcacgctgggagctatagactggagctgttcctatttggccatcttccttgttcattttcttactttgcctctgtctttttctgtctcgtagcttctgcttactcatatttaggttgtggcatatcacaaagtgtcttagattcattcagccttggcatttatcttcctttgctcgttacacagttctttcgttttcttagttcacattcctgagagaatctgtttgacttgtgtatcagtcaaaataagctaacttatgttgaaataatagaaatgtcccacattattatttcttattcatgctacacgtgcatcgtgggttgattgggggctctgttccatattgtcttcattcaggatttagattgcagtcataatttgaagcattgcaggaaaaaaacatcatgcatgtgtacagctttcaatcaaaagttacatatcaccttggcttatatttcattgatcaaagcaagttatctggctacagaggacattaatgagataaggaagtataattcttccatatgccctggaaaagaactgtgattatagagtgggtgtggtgactcacgcctgtaatcccagcactttgggaggtcaaggtgggcagatcacctgaggtcaggagttcgagaccagcctggccaatgtggtgaaaccctgtctctactaaaaatacaaaaaattagtcagccatggtggtgggcacctgtaatcccagctactctggaggctgaggaaggcgaattccttgaacccgggaggcggaagttgcagtgagccaaggttgcgccattgcactccagcctgggcaacaagagtgaaactctgtctcaaaaaagacaaacaaacaaacaaacagaaacaaaactgcgattatttgatgaaaacactagtgactcttacagttagcccccctagctactaggcattcacttcatttttgtttcctacccagaatacacactttgtcttcataaaaaaattgtatgggagaaattatgtatttatactcttagccaggtgacgtctggtaacttcctcctttagcttgcatcccagaatgagaagacctgtgaagaagacctgcagcgttgagcagagctttactcagcccttaacttttgtttagcatgaacaaaaaaataactatttggtgtggtaagtcactgagattttgggattgttattatcagcaagagctgacttaacacaatgagttttggagtaagaccacctgggctgagtgttaagtctgcttgttttgtgattttgcatcagtttaagttctctgaggctgggtttctttatctgtaaaatgatgttaataatgcctatctcacagttatgatgtgaggattaaagtggatgactattgtaaaatgcttagggtagcactcaacacatgagaagaattcaataaatgtcatttccctttcctttactttccaccttgctgtccctgttggtagagttattcaagtgcatgattacttgttaaaaatctcatagaaaggaatcagctgtgagattaggaattgaataaaacgatcttcttaggtggacatttttagcccaaatttaataatttctttttgaagagaatctaagatgctcttataactgatctttttcacaaatggtaggttcctgtacagtgataaactagatttttaaactgagctaactagaccacactacaacatacctggcttatgaaatgggagggctgaagtctgtagggctgcccggaaactcaggtaagagttgaaattgtaatcttgagtctgaaattcatagggaaggcctccatgcaggaaacttgggcaggatttctatattacaatattgaggcagaattccttcttcttcaaaaacatgtttttgcttttaaggccttcagctgatgggatgagagccagccatgttatccagggtactttccctttacttaaagtcagctgattgtaaattgttaatcatctctacaaaaccttcacagtgccacctcgattagtatttgaccaactaactaagcaccatcatgtagccaagctgacacataaaaattaagcacccctaggtgaaaaggtactgcctgcagcagaagagggtatgaggggcacagagccccctcctggtcatgaaacattgaggtcatgcttcacctagtcatgaagcattaaaggttgtggcagccttgttctccatgctttttcagtacatgtgatgttgtatggtgggggcaggagcatataagccagtgtgaatggtttttgttgcagtctccatacagaccaggggtctattttttttttttcaaacttgaaagaaaagtagaacattttacttatacttagagctacaagtggcttgttagatatcagagagtgtactgaattagaaaaaatgttctactgttggccagttgccaccaacagaaaagttaggaagatgtttaagttgatggagtgcttaatttagtgatagtttttggtgagcttttggaaagctttactaggatttaggaatatgcctgagtctcagtaagcttctccttagagaattgaagagtctctgcaattccacagaaggcagtacactcgaaaaccatcaaaaggatattattctgtaatgctcgtaagttctgtctttagccagttaaatatgatatctactggattttaaatgactatcattttaaagaatgtcttttaagagtttactgatttaaatcttttgataggcctgtcttatggctgtcatcctgatttaaataaaaaaaaagcttttcaattgaactttcaggttgaccactagttataacttctaaaatctctatggatttgatttactgcaaaagtaatatcattaattttataagactacttctaagctgtgttttccttgcttttggattttccctatgacaaatggagaaggactgttaaccaagttttattggggtaagatcaattttatgaagcctgatgacttcttattctaaattttacctgagcaatgttccagcttaactgaatggctcataatattgagtgactctcttgtcagctctttattgattaatgacacagataaaaaagatgtaccttgtcacaggaggattagaatcaaggaaactagaagtctctcatctcatctcaagacagataaagtctatatttaaggatgatacgatccatgaaagagaaggaaaagtcagggtttagttaagcaatgtggagatgagaggagggataaggaaagagaaagctcatgcagagatactgttttgaagataactcgtggggaagaaatgggcagtcatctgggcagccagcaaaacctattccatgaagccttggtaagtaagtggctttgatgacatagtggaaaaatgagcactgttactggctgtcttgttgtttagctgtcagaaaagattgtgctgcttcctacatctgctctcacatgctccttcacctgctctgtcttactgagatggataaaccttgtagttcaggactgtcaagggcactgcaattagtactaaatcatcctcactctgacaagttctggcaacagaagtttctggcagatgtgtaagtgcattttcagtgtttcctgagtgtctgaaggcatagcagagccctccatacactgtgcaacttaattcgatagtgaattcaatgcaagtttagaacaggagaaatattagaaataaagatgggctgttgttttttgcaagtcatgatcaactttgtttaattttcaatgtatgtatctttaataaggtaataggaaatccatgtttcatcttgaaactccagaaagggtttttatatataaatgttgctgtacctcagatgctggtgtacttcagatacttcttcccagaatcgaattagctagttctggaagagcatataaataatagtgatcaaagaatatacctagtagctagaaaataagaaatgatcactgagaaattaaaacattatggatttaaaatgttggtttaacttgaaagacagctctagagcagtggttaaaagccctggctctgggaccagagtatgtggagttagatacctttgcctttattatttaagcattccaaacatttctttttctgcaacccaagggtagtaacatacaggcaaaaggattaaatgagatattaggttaaaagatgactgacacagttatctgtccaatgcatgttggttgtctttatgatggtgatgaagatgagacttccattttccatgctcaagtaagtcaaaatgagcgcagaaagctggataaacatagattgtttgtaaccattttggcaaaaaaatcacaggagagtgtggtaaaagattaaaataaaacctaaggaggtataaaaagatgaaggtattagaaatcctatctctacaaaaatcgaggaaatggagaaaagataatttgtgggctttcagaataatttgttagcattttcagttttatgcatttgaatatggttttggatttgccaaactattgtcctgaaacttttgaattaatgttgtaattgtgtactagtgttttatcctatttcacagaagtcccatggacattagataaataagattaattagcctctttgttaccagttgtcagaactataaagaatcctttcacttgtctggcctaaccgtgatattggatttggtcaggggttatgtaggtgtttgttttcttagtttggttctttgtgatctggctgtaaccttagtcttaggctgccatagtagaagagctctgttgcagggagtatttcctttgttgcttaagagaaccccacttacctggagctgctgtcttgaccgtgtcttctttttatgatatggctaatgtgcgagagtcacccggttgctatagaagtttttattccttctattatttttaacaaaactctgatgttagttcttcagttattatctgattcctcttgaaagtagagtctttaacaaatacaaaaaaggaagcttccagttaatcaagatttaactgcttcatagagaagctgagagctgttaaacaaatgtagtcagacatcccctgctatgtgctactctttagtttctggttcattatgtcacatattagtattgtttatatcagagcaggcttgtgttcaacagtgagaagtgagctagctgtttcagggtgttaagacagttttggcttttgggcagattaaataaatgggatcttctaagtggcagaggggtggtgggaaaagcactggctcggaaatctagaactgagttctagttctggttttgttggtgactaccagcatgtgatatccacaactagaaaatgaggagaggctgggcatggtggctcatgcctataatcctagtgctttgggaggccaaggcaggaggatcacctgaggcgaggagtttgataccagtttgggcaacatggtgagacccccgtctctacaaaaaataaaaaattagccaggtgtggtggcatgcagctgttgtcctagctactgaggcggctgagctgggaggatcacttgagcttcggagatcaaggctgcagtgagctgggattatactactgcagcccagcctgggtgacagagcgagccctcatctctaaaacaaaacaaaaccaagaaaataaaggagattggctagataatatctctgattgtttctgtctttaattatttatcctgatttggttctacgattcaaaaaacctttttttaggagatggagggaaggagaaatgccaccaaatgccttttaaagcatcttcagagatttcaaacctgtctgaccttctttacatcagggcactgaaacacatgggagtaccaggcattaacagtatctcaaacccacgcaagctatattcctcacacagaggtttccttcttcagatggtggtggtaccatcccagagtgggttagctggctggttaaagaaatgtggcctactcactggtcttgaatcagcattccttgtgtggtttggaagtctttttatgatcgagtccctgcctcttcctctccagttgtgctggccttcttttagttcctggaatgctgagtgcttcctcctgacataagatcttctttatccttgccactctctttgccaggaatgctctttgcacctccctcagtctaatgctgtttgttgtggcacctctctcagttagctaactcctactcactctccaggtcttccctcaaaagggccattcccctgatctgcctgacttggtcacttgtccttattatgcacactttcagtgccatgtaataatgtcacatttgtttgtgtggttacttgattagcctgttccttccccgatattctgtaagctccgagaatgcagatcacatgctttgctgtcttttgtatttctttttttccttttcttttcctcccgagatggagtcttgctctgtcacccgggctggagggcaatggcgtgatctcaggtcactccaacctccgtctcccaggttcaagtgattctccttcctcagcctcctaagtagctggaattacaggcacgtgccaccacacgtggctaatttttgtgttttcagtagagatagggtttcaccatgttggctaggctgtcttgaactcctgatctcatgatctgcccacctcgacccccaattgtgttgagattacaggcatgagccaccacgcccggcctgccttttgtatttctggtgcctaactcagtgactggaacctaataggtactcagtgtagatgggttgaatgaataaataagccagctaccaaagcctcttgacttggaataggttatgataataatgataacaaccaccacaataacagcagatatttattatgtacttcctgtgtgccaggcactattctcctcctctccatcatcatcattgtttccaaaatcaccattaccaccactttttgcgtagttactgtgcagagtacttcatgtgttattacatttaatcttaacagtatactttaaggtaggtactattactatccctctttttcagataaggaagttgagactcagaaatttaataaacggcttattaactcaggaattctaggtccctagtattcacatccttggcaactatgtctttatagttgggattattgtaggaaaaagtcaggagcttgctgtaacgtttgctactctgatcattgtaacacagtgtaacttcatgtaggtctaccactacagtaagagtgtagtggatatcttgtcacttattagatgctacccagcatctattttcctgggaaattcctatgtgtggaaatcccttctcccttccatgaagacagagcctcccttctattaagctgaaaatgtcagacacttgctttctcagcttttcttgtagctagggtatgggcgtatgatgcatttgccccagtttctgaatcagaagctagtgacacaaagaagttaccagggagagaatccattctgctgaagttaggcgggagcagcagctatactgggtttccagacaggactgtcagccaatctagaggtagcatccagggcccagagttagtggtacagactctagggttgtggtttcttcacggaatctgttttaaggtatgattttggactttgtcccagatctggatttccaaaaggcagtataaagcatggactctcatgctagactgactgggttcatatcccagcttttatcttggctctgccacttaccagtcttgtaaccttgcttgaggtggttagttaacctctgtgtgcctcaggtccctcaaatgtaagaaggggaaataatagcatgtacctcataggcttcttttgaggattaggtgacttatttaaagtaaaactcttaggacagagtctggcatatttattgtaatgtacattagtgctttctatcatttttttttcttgataatgattcttttttttattattatactttaagttccgggatacatgtgcagaacgtgaaggtttgttacataggtatacacatgtcatggtggtttgctgcacccatcaacctgtcatctacattaggtatttcttctaatgctatccctcccccggctccccaccccctgacaggccccggtgtgtgatgttcccctccctgtgtccatgtgttctcattgttcagttaccacttatgagtgagaacatgaggtgtttggttttctgttcctgtgttagtttgttgaggatgatggtttccagcttcatccatctccctgcaaagcacatgaactcatccttttctatggctgcatagtattccatggtgtatatgtgccacattttctttatcaagtctatcattgatggacatttgggttggttccaagtctttgctattgtgaacagtgctgcaataaacatacatgtgcatgtgtctttatagtagaatgatttataatcctttgggtatatacccagtaatgggattgctgggtcaaatggtatttctggttctagatccataaggaattgccacactgtcttcgacaatggttgaactactttacactcccacaaacagtgtaaaagcattcctatttctccacatcctctccagcatctgttgtttcctgactttttaaggattgtcattctaactggtgtgagatggtatcccattgtggttttgatttgcatttctctaatgaccagtgctgatgagcttttttcatatgtatgttggctgcataaatgcctttgagaagtgtctgttcatatcctttgcccactttttgatgggattgtgtttttcttctaaatttgtttaagttctttgtagattctggatattagctgtttgtcagagggatagattgcaaacattttctcccattctgtaggttgcctcttcactctgatgatagtttcttttgctgtgcagaagctctttagtttaattagatcccatttgttggctgggcacggtggctgaccagcctgaccaaatggagaaacgctgtctctacctaaaatacaaaattagccaggcatggtggcacatgcgtataatcccagctactaggagaatcgcttgaacctgggaagtggaggttgcagtgagccaagattgtgccattgcactctagcctgggcaacaagagtgaaactccatctcaaaaaaaaaaaaaaaaaagaagaaaagatcccatttgttagttttggcttttgttgccattgcttttgtttcagtcatgaagtctttgcccatcatgcctatgtcctgaatggtattgcctaggttttcttctagggttttatggttttaggtcttatgtttaagtctttaatccatcttgagttaatttttgtgaaaggtgtaaggaaggggtccagtttcagttttctgcatatggctggctagttttttcaacactattttttaaatagggaatcctttccccattgcttgtttttgtcaggtttgtcaaagccacggtgtttatagatgtgtggtgttatttgtgaggcctctgttttgttccattggtctatatatctgttttggtaccaataccatgctgttttggttactgtagccttatagtatagtttgaaatcaggtagcatgatgcctccagctttgttccttttgcttagaattgtcttggctgtacaggctcttttttggttccatgtgaaatttaaagtagtttttttctaattctgtgaagaacgtaaacagtagcttgatgaagatagcattgaatatataaattactttgggcagcatggccattttcatgatattgattcttcgtattcatgagcatggaatgtttttccatttgtttgtgtcctccttgagttccttgggcagtggtttgtagttctccttcaagaggtccttcacattcccttggaagttgtattcctaggtatttatttctctttgtagcagttgtgaatggaagttcactcatgatttggctgtttgtctgttattggtatataggaatgtttgtgatttttgcacattgattttgtatcctgagactttgctgaagttgctcatcagcttaaggagattttgggctgagatgatgatggggttttctaaatatacaattatgtcatctgcaaacagagacaatttgactacctctcttcctatttgaataccctttatttctttctcttgcctgatttccctagccaaaacttccaatactatgttgaataggaatggtgagagaaggcatccttgtcttgtgccgattttcaaaaggaatgcttacagtttttgcccattccgtatgatattggctgtgggtttgtcaaaatagctcttattattttgtgatacgttccatcaatacctagtttattgagagtttttagtatgaagaagtgttgaatgttatcaaaagccttttctgcatctattgagataactgtgtggtttttgcctttggttctgtttatgtgatggattacgtttattgattttcgtgtattgaaccagccttgcatcccagggatgaagccaagtttattgtgctgtataaggtttttgatgtgctgctgtattcagtttgccagtattttattgaaaatttttgcatcgatgttcatcagggatattagcctgaaattttcttttttcgttgtgtctctgccaggttttggtatcaggatgatgttggcctcataatatggcccaggggtttggggcccttgttctaagtacttactatttttagcaaatattttgtctaattaaatttattagttggtgtatgtcactgacaacttagaaccctgactaatatatacagctcatacttagtgaataactatgtgtgggatatagtataatcatgggtttccttttaggaggggatttatagaaccatttcttcatgtatgttcagggccaaggctaatgttatttttattaaatgcccaagtcatttgctctctagtttatttcgggttgatttatttcattgaagaccttaggccttgactccaggcttgttgcaatttttgtttgtaagccctgaaacagagattctattctccctgagggagaaatggttatgaagagagcttctcatgttaggatgtagtggctggtgtcaggcagtgatttccttatcatcaccgttgtgattatcttggcatacatatattgctgataattgatattctctatgaagagcctgtttaactcacgtctcatcccaagtgaagggccatcttgagcctgagtttccctctggaactctctttatgttgctgagaagcacagtgcctcctggcacattagctttcagtctgtgaaagcagatactttcaaatgggaaaatgccatgcaaggtgaactgttggtattttcacagcaggcaaattcttagcaccctcagtataaaaacactagtgaatcacatttatggttttgtaaccattacaatgagaacagacagtgacattcaaatctcagaaaattgaacccttgatattgattgttaatgtggaaaacttgaagaagcaggtagaacactgtgaccttacgatgtgaattctctaatcagaccatacagatcagtcaaatatttgacttattgatttttggagaaacaagctattttgtatgcaagatatgaaaatactagaagttttcgcccttgattcagaataagcaatgagagtcaaggtcttatgcagtaaatttgaagttatgttaagtagtatatactttcaatattttaacagaagggatcatcagttttctcatacatgtagctacatatttaaaacagtattatttgcatttatattttaatttctgttttatctcatattaatttattaatacagatgtaatgttattaagaaccaaacatactattctaaatatttaaaagatctccaccacacagaattataaacttctgcggcccacatttgaacatacttcttttctgcagtctcatctctgtaaactttgctcacttaaaaaactactcatttagagctttatctccaatttctagtactttggaggctaaaaatgcagttggctgagttaccctgacctgttaaagcagtctttccattttaacttaagttcaccttaagaaacatagattatctttggacaaatggtgttggatgaattctgcttcctaaaacaataatgtaagtagtatttgagtaagtaagtatttgagcattgtggcattttatcagaacaatttaaattttcccctaatctcttcaatcacatcttacaaatatttgaaaacaattatttcctcactctggataaccctgttgtacttgcagcctctcctccttgcgaccttcttttctccttggtgctgtgttctgcagctggctcttcatttaaattccaccacaaattagttggcttgggttttcagtgttctgctttaagtaagaggggcctctccccctctccttctcaccctctccctctctccttctcagtctctccccctctcaccctctctccttcttcctctctttttttggcaaagagtaatctttaggcagtcttagcttctcccaaagcttaagactagagcattgctgcttaggtagaataatgtgtagagagaactctcatgtttcagaatgactttgagaaaccccaaatcccaaaattgttttaatctttaaatgacgttgagatttttatatcgaaagtattaaataattgtatgtagcctcttgttggtagatattctaatttggtaggattaaaacacattgtcctttaaaagcttactagttatagctagttttagttacagcctacatcttgtgtttttatttttatggttcaaatagtgcctgaattctagatctgcatgaaaaccatgctttcttctcagcgtttggcactttagttgtccctccctgccaactaccttctttacatatacacttcagaggttaaataagaggaagctagaatgagtctgaatagtagattctaaggcacaattacagtattaaaatctcattcatctctgctccagttttgaaagagcattggtgggaaattataattatagcaatagctgagttggctccttgtgacacagatttataatgttagatattagggatacttattttttttttccatccaaagtctaattttctgagtcacttggaattttagatcttgcctttctccagggaccatctggtttggaaaaggtacaaagattgtgagctgtggtatgggcatgtggaagagatactagcacaaggcactaaacaaatagaggagagagatggctaaggcagaaagagcaggagagccaaggggagggagttaataaggcaagaacaataaaaaagggtggttggtgaagaaggtgttgtggtgaaaaggaagaggagattgaggagagagaatgtagagaagaataaatggtgataaaaggatggagggagaatggattcaaaggcagaaaaattagtaataaaagagcagttaaaggagagtaggaggtagagagtagaggagggtgaggaaaggaaggttacaaagatggtgaggaaggaagaaagaaatggattgactccatatccagtgttctgctaacactggtggtagtcactgctgttagctacatggtctgtttatattgaaggtgaaatcacagcagtatagggcagatcaagtggcatttaatgcttcacagttcctggaggtgaatggatgaacaatgaatgatttgcatctttttacttttgtaaagagtcatgaagttaaacggaattaagtgaatcatcaaatcaccttgttttcctctgaaaaaaattaagtatatgctttggaaagagaatttatttgtgtagcaataacagtttattaaatacatgaaaagttgaattttacatatttcattcaagataggagaaaaaagaaaacttaagctaaacttttaaaagacacaaggtgttataaagcagcttttggtgacatttattgtggagcccttgttttgagatatgcgtttttttttttttttttttggagaactgttgttgctgaccagggaatattttaaaactagaaatagggccttcattagcttggagttattcagaagtcagctgctatttagatgatttttgatgtagggtagagggagagacctcaaggatatacctgaaactatgcactttggctgggcgcggtggctcacgtttgtaatcccagcactttgggaggccaaggtgggcggatcacctgaggtctgaagttcaagatcagcctggccaacacagtgaaaccccatctctactaaaaatacaaaaattagctgggcgtggtggtgggctcctgtaatcccagctactcgggaggctgaggcaggagaatcgcttgaacccggtaggcggaagttgcagtgaactgagattgcatgtgtcaaaaaaaaaaaaaagaaagaaaaagaaaaaagaaactatgcagtttgtcaaaacgggcaaactgagtctcctaaagagggcctttctgtgtaaagtgaagttctgcctaggattggtccttcctgtgtaagtgaaggtctggtgtggagcacttcagttatcacttgacggattcctagctggctacacttgatacttgtatctttaaatttttcttgatttgtatttttgtgtggggcaattttacctaatatattattccattcacagaatagaggaatttaatcagcatgaaatcttggaatgttcatatctcagaataactaattaaatatataatagaccattgtgaaagttggccttactggtctattagattgaatataaaaagggacagctaaagaaaaattattttgcttaaaataaaaacattcttttaaaagtttgctttggagagcaggaagcaattgtattgtaagtatgtataattatctgcattcctttccaacctctttgggatcaaattggttttctccaggaaaggcaattatatgcaggaggccactttttgttgaattagtgtgtgttgcatgtggtgcatcccacaaacctgaaatcagagatgcactgctatgatttataatacccattaattacagctttgtattaaaggcttttagttttctgcttcagtaaacctaaattctccctttgaagaagaattgcttacattaggtcttatgctaactagtgaatcctgtcttttagagtctcatcaagggtacttgatgcagcaagaacttctcagttggctttaaatgggctttgctgaagctgtttaagattgtagggtgatgagataactggaagagattctggtcttgtgatggggaggcggcacacaacatgattcaaagcattaatcaaaaaggatttatgcaccagatgtttatcatccttatagctccatgccagactttgtactgtatctgatgtacacactttccagctagctcagtggttcttaaccccagctgttctttagattcacctggaaaactttttttaaaaagtgctctgttttcaccccagaagaattaaatactaggcatggatgtttgtaaagggccccttgttgaatctaatatgcagtcaagactgaaaacacaagtctattcagtccttcatcgtggctttttacttgaaaagttagatttccccttccctttgttttcagcttcttattccttccagaagtaaataatgtgaccaagcaaaacaaacgaacaaaaccgggttgcattattttttcctgagcttctgtgatagtttcattctatatttgggggacaaatatttccctggcaaccctcttaagttttgtaactttaccttccaccacccctgcgccctatctgaagaatatctagtctaagtctaaggtctctttgctaaacttgaataactttgccagagacctgcttttcagtggggctctactgtttttttttttctctgtgaatatttaaaatcacatttcgacttagaaaagttttgaaattaggatgatagtgtttttcattacatcttttcttgtgcaaattactcattaaacttcattttgtttagatttcacatgcttgaggaatttgtagatattatgcatccattttttaaggaaaggaagcatgattaagtatagactaatcttccaaagcatcagtttgtccatttgaaaaatgtctgtgtttgctatctactttttctgcaattctgctatctttttttttttttttttttgagtcggagtctcgctctgtcacccaggctggagtgcagtggcgccatcttggctcactgcaagctccgcctcccggggttcatgccattctcctgcctcagcctctgagtagctgagactacaggcacctgccaccatgcccggctaattttttgtttttttttagtagagacagggtttcaccttgttagccaggatggtctctaatctcctgacctcgtgatctgcctgcctcagcctcccaaagtgctgggattacaggcgtgagccaccgcgcccagcttactctgctatctttaaaaacatttaaaatttttttcatttttatgtgtacatagtaggtgtatacgtgccattttaaatttgaatatatttggaaataatactctacttgtggcaggtattcctaaatgatgttgcaagaagttaagcagggagaatactactactgctgctgctgctgctgctgtttgaatgtggcctctcccaaatccaggtgttgccagtgtgagactattaagaggtgggggcctttaagaggtgattaaagaggtgtactcagtttatgatccctatttaataggtgagaagaaagtggaggctagagtgtgagagagcccaggtttgccagacaccagagccaagcttttaacccatgctgttcagccttttctcctacctctgtgcacttcaatgctgccactggcatagaactcctggtagcatactctttttttccaggggagcatattgacttgatttgctttagattctttgtttctttcctcccaatattgagcattaggcaatcggctgctctgggcatccgattttatttgcatgcagtggactaggcactgaggaatgcaggcatgctttgaggctccgtcatgaagggcgagccagaagggcctatggagaacaattaatatgtttcccctcacagatataaatacagtttgattggtgactgtattttcttttagcctcctcccttcctcctcctacaacttttttgtaatcagcttcgaagtataactcacatatcacacaattactcatttaaagtatataattcaatggtttttatgtattcacagagttgtgcaaccatcacttcaatttcaaaacattttcatcacccccaaaagaaaccctgtaactattagctttcatccccaatctacccatcctcccagacctagacaaacactaatctactttcccactccatagatttgcgtattttggacatttcatataaatggaatcatatgtggtctgttgtgactggtttctttcaggtagcatatttttaaggttcatccattttgtagcatatgtcagtactccattcttttttactgctgaatgatatttcatcgtgtgcatataccagaataacgactgttttctagcttgtgcatttcacttgtcaaactcccagcattgttttgactgccacagccaacgtcctgcccctcactaatacaggacataataggcccagagcatgtcaaggattttccaaagttgcatagctagactatggctaaaatggaaccattcattcttttgcacatttatcacatttttattgagtgcctaacatgtgcaaaacactatgttaggttttatgatatatacaaacataaaagacatggcatgtttccttaaagaacttaggatcctctagggatgttgaaatatgaaacaatctgtgtctgtgccctaagtgtgtcacgggcaaagtcaggttcagaggaaggagagaattgtttctgcttgtgatttgaggctaccagttttcctgactcctaggtcagtgttgttgttgttgtggttttgtttgtgtttttttaaaaaaatcattaccttacctctctgatgtcactttgggtgtcctagatacactctatattccacagatttattcccatgcccctaccccctcatgaacttaaacattaaacatgagtcattattggaattattgtagttttaactaataaatagtaaaattttattggactcttgaaggtcatgggtcatcatggacttaaaaattttagtgtcagtacccagttgtccagaatttagaattggtaaaatacattcagctaccaaaattgcgcagtaatatcatcctgtttaattcagctggaatttaagttaatggcagatttaatggatgggacactttgtagcttctgcagaccctgataagctttacataaataccaagttgcagctacttgagtgaactacagttccacaagagaaattcactttaggatattttgaaataccattcatctgcttcagttagatattttaggtaccatgtcattcttccctatttattaatgttatataatattataccatgtaaaaagtattaacaacgtaaccatcattgtatttgcattgtagcgtaatcagctgtgaaagatgaattttcagatgtatacttatagtactctttgctaaaaattctgtaggccaccctgactcattggttataatattgtgtagtataagtaatttcatgatgtgattatttttatatttatttatttatttttgagatggagttcactcttgtttcccaggctggagtgcaatggtgcgatctcggctcactgcaacctccgccttccgggttcaagtggttctcctgcctcagcctcccaagtagctgggattacaggcatgagccaccatgcccagcctcattatgtgatttaaaactttataataaactgtaagaaaccaaaaacagattttactcatgaattttatgaatgagttggattttaagagatttatttattgggcctcactctgtcaccaaggctggattgcagtagtgtgaccacagctcactccagcttcaacctcctgggcttcattgatcctcccactgcagcctcctgaatagctgggaccccaggtgcttgccaccatgcccagctgatttttaatttttgttttatagaaacagagtctcctatgttgcccaggctggtcttgaactcctgggctcaagcagtcctcccacctcagcctcctaaagttctgggattataggcatgagctactactgtgcctggccaagttttatgaaatttaattcctagttttagaaaatgatacgttatatattgcttacaaatactacttaatagttatagtttggggcgtatgtattcatttaaaagtagtataaaggtatttttagaattaataacgtcaaatatcgtacaatattattcagcaaaattaaaatccatagaagatagcctttctaccacttttcacaagaaaccagaatgctttccatttctataacatttgttgcttaaaatatttaagtgagcatttatttttatgtcttgtcgacacataattttttcatattcacatatgtcttagctaaatactactactgttaacaacactactcgtaatagatattttagttaaattgatattttagttgaagactatagattctttatttaagggtagactggtagacaggaggttgtagtagtgagagtattggagaccctggtaaggaaagacatatttgtttaaaaccagatgataacctctgtgaaggataaatcaaagtttgtctttgtgattataagcaatatttttaaaaagtattataacccctatttgtgttgtaagctgtttgcatcttttatagcatagtattccctgttcataacggatcatctatgtcagtgatattgcacaatcatgcactgcactaaaatataaacaaaaataaatgaaataacaatagtaatagctaatgttgattgttttctgtaagtctgataacgtgtatgtttaatacccgtaatactacgaggtgtagagatttctcactttacaaatggagaaactaaggcacagaaaggtaaagcagtttgttaatgatcacttaaacttgactaatccccttatctgtgttcttgacctgctgtactgccttttaaaaaaattactctatattccttttctcaaacatgaaatactgtatattttttgtaacaagttgaacaagtaagaaagaggtacgttgacacttagactatacatttcattttattagttgttgttgtgttttttttttttttttttttttttttttgagagagattcttgttctctcatccagactggggtgctggggcatggtagcatgatcatagttcattgcagcctcgaactcctgtgctcaagtcttcctcctgcctctgcctcctgggtagctgggactgcaggcaagagtcagagtgcctggctgcatgtacattttttgatacatacaaaaacacatatgagttttttggaaattaacatactctactaaaattatttaatcttgactttgtatgaaagtaccttcttcttagttggaaatttgcaagtgattttaggttggcccgtgcactagaatttatattgactttgaattagacagacatgggtttgagtcttgacctgccagcgtactgtgttcccttagacaagctctttaacatctctgagcctaagtttcctcatctgtaaagtagttatcattttttccagggttctgttcttgtcttaaagatgaaagataatcgattaaacgatactctggttaaagatttattacattcggccgggcacggtggctcatgcctgtaatcccagcactttaggaggccaaggtgggctgatcacctgaggtcgggagttcgagatcagccagaagaacatggagaaaccccgtctctattaaaaatacaaaattagctgggtgtagtggcgcatgcctgtaatcccagcttcttgggaggctgaggcaggagaattgcttgaacctgggagatggaggttgctgtaaggcgagatcgtgccaatgcactccagcctaggcaacaagaacaaaactccacctaaaaaaggaaaaaaggatttattacagtcattccatataattttgagtcactaaaaacggaaagaaaccccataaattaagaatagataatcagaactgatttgtgtgttggttgataattctgagcattaactgacttgcttatatagtaatccatttgaaattggttgattggccataattacttggttaatgtgttgtagactactaaaaaaaagcatcaaaatttaaaacaattctttcaagaataacgggaataggaaaagttacaggtacactgcttttattcatagcccttttatgattcatcttgtttttcaggtcttaactgagtagagagagaactaattattttttctgtctgagtaggcgatagtttccagctgttctttgcagatttttaaaagctacgtttttaagtgcaatttaatgttcttattactgtattacagagggaaaaggtttgctctctctttcacagctgtatatattgtcccatacacatgtggcctttaaagaacattcaaatgtgccactgtcctcattatggagctcagatggctgaggatatagtggatgaagacctggcaacatttttaagagtgtgtatgtgttgtggttttttggtggttgttgtttgtttatctgtaaactactttgccttttgcaaatccagctaatatatattgcaaggtcaccagccacgtggtaggcaagatgaagtctgaagggaagctaaagcaagtaactatagtatcaggcagaatacgataatttacattacagagtaagtagtgttcagaggaaaggagagagaatgtctggatgaagaaagcaaagaaggcaatttgaaatgcacctgagaaatgaggaagatttatcaagagatggggatggagtataaagaggtagttaggcagatgctgtaggtagagagaatcttgtgggctgagagttggagtcataaatgcatgacatgtgtttagagtagggcaaagattcacttggaagtaaggagaggtgaagagtatggaacagtgtgaggagcttgaagtctgagtacatttgtatttagtaagcagtggaaaactgtgactttttaaatttagtttttcttcttcctttttattatttgtaagctttttatcttgaaagagttttacatacacaggaagttgaaaaagaaatgtatagaggagtccagtgtatccctcacccagttctccccaatgaaaacatcttgcgtaactttaggtgtaattaaaaaaactaggaaattaatgttagtacacagagctatttagtcttcatcagtttcacatgcacttgtgtgtacttgtgtatgtgagtaaggaattttatcatatttatggattcatgtaaccatcactacaagacttccctttatctatactcactttctccaactccccacctcctacgcttgtcagacactaatttattctccatttctctgattttcttttctttttcctttttgagacggagtctcactctgtcaccaggctggagtgcaatggtgtgatctccactcactgcaacctccgcctcccaagttcaagcaattctcctttctcagcctcccgagtagctggtactacagacgcatgtcaccacgcccagctagtttttgtatttttagtatagacagggtttcaccgtgttgccaggacggtctccatttcctgaccttgtgatctgcctggctcagcctcctgaagtgctgagatgacaggcgtgagccaccacacccagcccatttcttttattttcttatttcaagaatattatataagtggaattatataacttttagctttttaaaaaattttgaaataatcataagttcatagaaagttgcaaatgtagtacagagaagtccttctcatatatccttcactcagtttgcctgagtgattacatcttacattaactatattataatatcaaaaccaagaagtttacactggtacaatatgtgtttgtatagttctatgctgtcttatcatgtgaaaatttgtgtagccatccctgcaagaaagatacagaactatttaatcattacaaagattttcctcattctaccctgttatagtcatagcaccccatccttaatccctggcaaccactgatgtgttttccataaattttgtcactccagaaatgttatgtatatatagactcatacagtatgtacattttaagattggctgttttgttgttgttgttcaggataatgccctggagatccatccaagttgttgcatatatcaatagtttgcttctttttaaatcactgcatagtattagtttgtttaaccatttatctgttgaagggcactgaattatttctcgtttttggctattataaataaagctgctatcaacatttgtgtacaggtttttgtgcgaacataggtttttgggttttttttttttcttcatttccttgtgacaaacacccaagagtataaatgttgggtcatatgttaattgcatatttcatttttaaagaaactgccagatgatccagagtgactatactatttcacattcccaccagcaatgtaagagtgactctggttttgtattcttactggcatttggtgtcatcactgttttatttttgctcttctgataggtatctagtagtatctcattatggtcttgatttgccttttcctaatggctaatgttgttgaactttctttttctattacagactttttgtgttagaaacagacatgattcgggatgattttttcctggcttacatgaggagagaaataagcgataaggaggttatgttagaagctgttgaactagtctagttgggaacttcagaaggcttcgtgggtggccagtgttagaatagaaagaatgatgggtaagtctgcatggctgggatgggaaggattatggaaagaaaaagtaagatgaaaatttcggtattgatgcctggtgaccaaagggtcaagatattgctgaccaaaataatttggatttttttttgttgtaatttaggggaaaatgatgagtttggtttgcagtatggtcattttgagtgcagataggttatttaaattgagtttttcagaaagaagttataaatctgagtctgtagcttagaaaggttatggctagaattatttgaaaatcaaatatagagggatgataatttatatttttcttggggaagagcactagtaagcaaaagaaatatataaatcagagattcagaagaaaacctggtggggggggaccaatttaatagacattggtggtcagcacagagacattctatagaagactgaggaatataagcacagaagaaaggtgctgagggcagtttcagttcattggtatatgcaaaggccaaatcttaaggtattaaggtgtgtatatgtgaacaatacatttagggatttttttgttttttttaaacacaggagaaacgtttatataaagagaaaagaggaaccagtagtaccgtgaaagattgaagatgcatgtgagagcaaattatctcaaagctacagagcaaagatgcctgataagagaagcaagatgtgaggggcacattagggatagcatcaagagacaggagaaagtatcagctttgtcaaggagattaaatatatattttatagactcaagagggaaggaaaaagtctaccaaacacaaagatttttttgaggcgagaggctgaggaccagcatcagatggtctccttgatcctcttaggaaagtagatttttttgttgttgttaagatggaatcttgctttgtcgcccaggctggagtgcagtggtgccatctctgctcacagcagcctccgcctcccgggttcaatctattctcttgcctcagcctccagagtagctgggattacaggtgcgacaccacacccggctaatttttgtatttttagtagagatggggattcatcatgttggctaggctggtctcgaactcctgacttcaggtgatctaccagcctcggcctcccaaagtgctgggattacaggcgtgagccactgcgcctggatgattttttttataagacattttgggtgattctagattatttatttccaaaactatggctttgattaaagcctcaggatatgagcacaatacaatctttcattaaaatgttcaaacagcagcagcagcaagaaaggaatgccaacggcataaacaatatgtcttatagtcctaccagtggttgttacaaaagggacacacacatatctacccatgtatcttgccagaaggaacttatctttaaaagtattatggtgaacatggaaacatactagtcatataagagacatagtttataaaaaaccccaccaaaaccaaactttatgagtcttggataacccagaagctagtatttttcagtaatgaggagtagaggaaacggtcactgggcaaggcaattgctaataatgagtgttagttcagtgtagattatgaaattctgcaggcctggggagcaaaagaaggaaaagacacatgcagcaggaagagaatgggaatagtgaatgaagaggccatttcttgtattgcatgtagtgtttttgattaggagagggagtggttgttagtgttgatcatcaatcactaagacctggtatttcaaataacaaaagtacctttgttgtaaagtgaaatatttattttctttgaaatgtaaggttacataacttgcaatgaaatgtaagccagtattggtcaaaactaaacaaaaccatgagaagacaatttaattgtgacgtagaaggagtaaaaagggtaaataaagtggcctgagtttggtcctaaaatgattacgatattaaatagttctcatgccgttaaaatagtactaggccttacttccttttattcattgatttaataataccacatgctatttcatgtacttatttctatgggattttggttactatttatagctaaaatttatttactttattctgcttattcacaaatagtatttcgacctggcttgagctttatagacctaaaagctttagcacatggaacattaaaaccatgcttttcacttggatgattgcataaagcctttttataacagattctaaagcctgatgcaggacagtattcacacagatgttgaaagagtaagtaacagatatagggattgttgtagggattatgctgttgttagctgttgtcgtcgctttcttttttcttccagagtatagaataagaaggcatagacctaagtttcaactgaactcagtttgcttggactgagaagaaactcacgtggtttcttgtcacactcagaatttaaaaaaatcccaactcctaactgtgatccaaaagcatgctctggtccctgtgtgtctgcctaatttcattttttaaaactaggatttctttgttcttttttagccataccattttgttgttatttcagggccttaaacttggcttttccttcactatggaccattcctttctggtttttctgtgactctccaaatacaggtactttaggccctttacatttgctttttcttcatccttcagtattttccccctagttctttgacctttattcaggtctgtttcctcaaatgtttccttctcagataaatttttcctgtctaaaatagccttttagtcccaaccttcccttattactccccactcccttaccagattgttttcattatagcagttaattatatctgacagtcaattttgtatttgtttccaccattagaagacagggactttgccttgttcatgtctctgtccttagcatctagaatagtgactgtcagggagtaatctagtcaaagtactcaaataagtactgttgaatggatgcaggcttgcctaattaagttgtaaggacaagttacgatgaagccattatttaggagatatttgaatatgggttagttaggtgggatgataagtagagggatgaatatccatggtagagattgagattccatgaacatgtgacagactgggaaatcatactttcacatccttctggccaccgtggttagtctagggcagcttgacccaaattgaacttaacccaaattgagctaggcagagtacctagctttattctatgaggccctgcccttgccctgtttaccttaactcttccttagatcctgtgagctgctgcaacctggaatccttttgatactgctgttttcccctctttgggtagttagaatttagtttctattctttgtccatgtaagagttctgcctaatatcaaggggtagagataggtcatgtgaattaggtcggagttagatgtatgtttgtaactattaacattagacctgagcaagtattggtttatgcaaagggctgatatatgcagtactgcattttcttgtccttttaattttaggtctctaagacagagtagaagctacggaaaaaaaatgtgtgtctatatgttaggagtttttaggttataggaaatctgagcatctgtagtagtccacatatcattatcaatggctagagaatctatccacttatctggttggcatttaacgagtgtgtaccatgtgtaggacattttccttacatacaaaggttaattaattcattttacagagacatttattgaatgaaaactccatgctgtgttttgcagggtcacagttaaacaagccctggcttcccccttaaaggagcttacagtccaagagagtgagcatgacaagcaaacagatttgtgcaaagcgccataggagtgtgtgttgcagggatgccaagaagggagtcatcagttctaaggttaagataggagaaatttcttggaaggttcttaagagatggaaaagttaaataggtgtttggcagagagaggtattgggtgtttgtggaaggagaattggaattccaaagagtaaaggtgtggaagtgctggaccagtggaggagatgttgttcagaatgtctggagagtatagcctaaagggaagaagtgtcaggtgaggaatgggacagaagaggaggctgaaagagggagaacaggctaaagagttgggactgtatatggagggtagtaaggagtcatttaacccatttatgcctagtgttccattattggaacgctaagcttgtgtagtaaggagtcatttaacccatttatgcctagtgttccattattgaaacgctaagcttgtgggggttatttatatcctgctcatggtcatcaccaaggtctgatttttcacaaaacaatttgcaacctatggcatgaatgggttaagagacttattcaaggaaatagtggaacatatttgtattttggcaagtaccctgccatgacaaagtaaagaatgggctggaggcaggaagaccacggaaagcagataatctgaagccttatgttcttagtcacagatccgtccttagggaaagtgaggccttgcctgagcagaggctctagatgggcggattgaacttcatgaggatgctgagaacagtgaacacattcctgatgtgtccagtatatatggcatgttcaactcccccaacagttatatcatctttatagctcagccagtcatatttcacattaaatggcaaacctaggcatcagaaatgagaccttggaaaacagctagataactagcattgacataggaattattgtgtaacaacttggcttggtgagattcatgtctggggaaaatggatgaaaattgagtagacactcaataaatatttctgtggttggttatttatataaaagccttaatcttttttccccttacatagagtgtacatttgatttcttctagtgtgaagcataaggatttgtttttcatattcagaaaataaagcagttgagaaaattgtgtgatgaatggcaaaagaatttaatgtttatttttggtgacttttatgtagcccttgaatttttatagtcattgttacatcaggaaaacaatttaaaagattactagtcaagttctaacaattcccctagaaagttacaacaaaaatgacttctaataagcttgtttaatattaaatttaattggaataagcactcgattttgaatcagtgtcttcaagtttaccatcttctatgacatattcatgttgttaaagatggacaagaagatggaaacttccatgttgcccaggctggagtgcagtggtgtgatcttggctcactgcaacctgtgcctcccaggttcaagctattctcctgcctcaggctcctgagtagctgggactacaggtgcatgccaccatgcctggctaatttttgtatttttactagagatggggttttaccatgttgcccaggctggtctcaagctccttgcctcaagtgatcctcccaccttggcttcccaaagtgctgggattacaggcatgagccgctgcccctggcctgatcaatgaaatttggatctcaaaattatttttatggtactacaagcactacatttagaaataattagaagcaaacacatttaacttgcagaagaaacattttactaaaaaccatatggcgatagataatttgatttttttttaaagaagcaaattgaacacattggggattgaaataatttgagaattctgtaaatgtactcttaaaataattgtctctagggtaagcatgttaattctgagtgaagctcagtcaattaattcgaaataggagaagtgatagtagtggtgatggtgggagttttagtagtgtttgttactagcagcagccactagcttttagcacatagtccattgttttatataatgcatatttgttgaatatatagttgaaggcctgtttatatgttcccttcatttattaattttagttaatacagtaaagtttagtttacagtagctgggtaaaattgggactagtgccctcatttacagatgaggaaattgaggcactaaggaatgaattaaaggtcatatagctagtaagggctaggatttgaactcaggcatgtctgaccttcaactcaggcttacatcatttgttactatgttctttccatctgacttctgaattcccctttcagttttatttatattaaagtccctagtatgtaatctctgagtacaatcagagcatgcataatattgattttatattgaaagaggttggaaaaggagaaccccactagaatgaatggccaataagttttctggtggtgttggttggaatcccagccaaccatatttaccaggattattgccttagcaacagcctgcccgcctaatatttaatctgcaatgtagtctgctccaggagcagtgttcttgggaaaactttaatctatacaccagggtttcaaagctgggcctttttggcagtagaaactgtaattagttcaaaagtagaatgtagattaagtagtcacttggaattttactgagaaatgattctgagaatgtttttatacttactgagcaagtgagacctgttaccaccttcaggggaggagtcccactgtgtggaggacagcaaggagcataacaacacctactgtcaggagcagcagtcccaggatgtcagcccaccacatggttgcaattgttggattcctgaagagatacatgactcacacaggctgtggatggaacaatactttactcacatagagaagaggtggcaaagtcagcttcagtagtgagttggttgccatgtctagcgggtctcaccctgcagccaaggcagggaggttgtgggtgtgccctcatcccctcatgctacagatgaacaaccctgttctctccttgccagatatagcagtgaggttggccaggtactatatgatgcacatgcttaaacagaacaaagaaagaaacctccagcccagaacagggaaagacagtccctaagagatatgtgcagtacagcttgtgagaactctatctctttataaggaaatgtaggcccaggcacatccttatgtggctgtgcaaggggccacaggctgcacatgagtgggcttcccaagggtccttaagctgtaactgaaacgtctcatgcttaggagtataacagagttctctgttttaagaattattcttaattattggttattagtctggcaactggatttgagatttgtttgcatttttaagagtatgtgtggtgttttaaaagtgttagattatttaggccgggtgcagtggcttaggcctgtaatcccagcactttgggaggccaaggcaggcagatcatgaggtcaggagatcgagaccatcctggctaacatggtgaaaccccgtctttactaaaaacacgaaaaactagctgggcgtggtggcgggcacctgtagtctcagctactcaggaggctgaggcaggagaatggcgtgaacccgggaggcggagcttgtagtgagcggagatcatcgtgccactgcactccagcctgggcgacagagtgagaccccgtctccaaaaaaaaaaaaaaaaaaagggttagattatttacactcagtgtcattaactaatccttacaggtaattctattttctaatactttaccagtttcctacactgtagcacagggagctgttcctttgttaacttatttgggattctgtcaagatggagagttaatataggctgttggctccttctcccaaaactaaccatggagaaactacagaagtaagaggaaagcagagatctgaggaaatacctaaaataactatgaaaaattataggggtgactgaggctgttgcaaattggtatgcctgtgtatgtggtttcgtgtagggcgcagggtgtcctgaggcatcaatcaggagaagcaaaattgttttgtttttttttttgtctttgaggtttgaggtttgatgtgactttctccaattgctttgagacaatgattgcccgccccttgccacagaaattggtgttagttgggttatttcagggcagcactaaaggctgatggggtgaggagctgatgaaaacgggtacaagccaaccagctgccccagggcactgattcctcctggagcgcgcagattataccctactgagattgccttcttccagtgctgcttctttctgggactttaaaggctaatccctttaaaagagttaccctttaaaggatttacattttaaaggagtttcctggtggtaggcagcaaactggagtgatcaagagagatttttgttgccagtggctcatcccttccatccttctcaaattcaccaagacagacagtactaggacttgtgttttggccatttttttcatgtatgtttctagacctagtagctcatagcttgtgttgaatatgatcccagaagccaaaataagtatatggagagtacagccactattgaaaatatgaggagataacaaaaggaatagtatagacttcatgaagcagaattatcgaactgagggatcaataattaaaaataaacataataaatgtattcagcaataaaggacaatagtagcagtattaacaaacaagaagtcataaaaagaacagagtaggaatattagattgacaaatataagacctgaagtaaagagcttaatcagataaataggatggatatagataaaagtggattgttgaacttgaatatcatgttgaggacctccggaggcagaaggaaaagcagagatagaaaatatatattttttatttttgaagagacatctcactatgttgcccaggttggtctcaaactcctgggctcaagcgatcctttcacctcggcctcccaaagtattgggattacaggtgtgagtcaatgcacctggcccagcagagacagaaaatattggagaaagctaagaaacatggagggagagagataatagtgctagcattcaaataatagaattcccagaagggagaaaagaatttgaaggagagaaaaatattcaaataaataatgatggtaaattgttcagaattaggaaagaacaaagacttcaaattcaaagggctaaaagagtatcatgaatgaaagacaagaaaaacccatatcctggtaaactgtagtgtagtgaaatttaggaatatcaaaaccaaagaaatctaaaatattttagaatgatagcatagattatccatatggaacatgagtcagaccagattatcttttcagcccctatgttctcagttactctgcatatttgaggtgagggaaatcacctatataatgtataattcaaaacttgcaaaataaatttatgaattcatattccatttgataaagtatttctcaacgtaataagggatatattttctatataaccttcctgattgaaaaagatacagggtggcaggtcatgatacataaccttgtaattttgtataactatttgggagaagttactagcattttcattaaagagatacatctctttttacttttgggagtgtgtacatgctgttttctttgatctcatattacagtatgtattttttagaaacgtgcttttgcagccatagatacaatgaaatagatgattttctaacaataacatataacataaatgatttttaatcacattgatgcaggatttttgctcctttagctcagctagttttggcttcttgtctcaccaccaggaacatttaggctcacaggcaccagagattgactggagtagaatttattaagcaaaaggaaagctcttagcaaagagaggggtcctgaatgcaggttgctggatgccccctcacagttgaataccagggcttttatttaaaagctgatgaggctgggttccttatttgtataagatgccaattcctggcagctccacccagtccttccagtgtgcatgtggccccttagtttgagccgctccatatggatttatttcctgtgctgcgcatgtgttaaggaatggaattttctactgcgggcatgtttaggcaagccccctctgtaagttcccttacctgcacaaaacatctggtgtaaacacttgtggggcgtgtcggaggttgtctggggacccttcccttactgtctgcctaaagcaagatggctaactcctttcaacatgtcctcatgctcctagattttaattcatttaaatatcatgttattattgcttgtgtaccggacagaagtctgtccaatagaaatgtgaaccacatatgtaatttaaaattttctgatctcacacctgtaatctcagcactttgggaggccgaggcgggcagatcacctgaggtcaggagtttgagactagcctggccaacatggtgaaaccctatctctactaaaaatacaaaaattagcagggcatggtggtgggtacctgtaatcccagctactcaggaggctgaggcaggagaattgcttgaacccaggaggcagaggctgcagtgagcccagattgtgccactgcactccagcctgggtgacagagggagaactctctctaaaaaaaaaaaaaaaaagaaaagaaaaaaaaaggatgaagttaattttaatttatttgatttaacccaatatattgcaaatattgtcattttgatatataattagtatacaaagttattgagatattttacattcttttctctatgctaagtctttgaaattttgtgtatattttatggtatatctcaatttggactagccacatttcaagaactcagtagccacatgtggctagtagctactgtattgtcagcacatctttaaagcaaataattgttcaatattctgagaattgttgagcaacttaagaactgcctttaagacttccattttattaagaatttgtagaactggatagttctgtagcaagtgatacttgtatctattatagcttgtaataaaaagcattaatacagcaatacattatatgtttgctctagttttaaggatagaaattacatcaaagcacataaatctacaaaaagttctgagattgatcgattgatttctacagctttttcttaagtccagatagttctgcctggatgcttaacaagcagttcagacttaacatggacaaaactgaatcttagtttttcttccagatttattcttgctcctattagtgagtagcatcttcattcttgccttgcataggggccaaaaaatcatgtcttgacctgcagctagaatgttggtgaaaagtcacagcctactgttgtaaatgtcctgtttccttaagtcctttgttgcccatatgtttactatatgtctttaaccaaaaatatttactgtacttttaggtaatgttaatgtaattaaaaaaatcagtggcaacttatggcaaatacatgtgttttttggtagttgactttaaaatgtgaactctttgatagttcaaatgagagcactgttgaagcatcttagtaggacagattttaattcatgctggcattaatttgattaaataaaattgatgattaaaagttgattaaaataaactgagggggaaataaatcaggcacaaatagcagaacaggaaaatcaagctttacatttggtgctctgtgctttgtccagaggatcttgtgaccattcattcaaaacattttactaaagaaaacaaaatttaactaagacatgcaagatgaaaatctctccctcttcctagttgtataactgttggtggttctttaattgcaacaaagtgcatttttatttaaagattgtggctgcttcaaaataatactatttggggcttcctgtgtgtattgagacctcttggaactaacattgcctatgggtttttattccctttcccttttcctaggatgtgtaatgaaacatgaagacgtcaaatataaaggatggcaattgctcagacttgtcctttgcttgtctagttatccatcaaacactatcagtgtgattgtgccagaaagtatgaaataatgttattggaaagcagtcagtcaactgtatgtcaaggtcacttaaaagtctcagccagctgttctgatatcaaagagcattttacaaatatgatatattaaaatgattactcttaggaagtgtatccccaaacatgcttactttaccctgactcttgattttatgccttggtactttgagtagaatagggcaggtacagataatagtatgtcacagtggtctagaatctacacctttcctgcttgcagtatggtattagctagggtccattccatcacgaaagtggcagctcatcattttgggcagtcagaaaaataggcagttgttataatagctacattgttttttaaaaaacttatgcaagcaggtaagggttttttcacttttagaccagcatcttttctttaccgtagaatctaattattgtctctaatctaaaaggagatagaaaaatgtagtaacctaaaggaaacaaagaataagaaaaatatctactttttgtaagaatgggattttgcatataatttgatttactaggtgacctaagttaacagggaactgatttatatttttactggtattaatacattaaattcaggggtttctgtgttgttaaaggaattctgtgtcatttgaaacttctatgaatttagaaatgagaagacatcagtgatctaggtggctacttgtgatgattcctaattttgtaaggaaaataaaaaggagatggaaaaaggatttggaacaaccctgatgtgtttgttacaacatttcaaaatatgtctatttcattttccttccaacatcctcaataatgagttttgtctctaaatttgtgatgaattaaacatttgtgaaatgcatcctatgtaatgttggatcagaggctgaggtgaaatttccaattgacataaatgtgcttatcacagtgaagacattatacttttctattttcatttcataatcaatggtttctattgatttttgtctgttagcaacggaaattatttacttcttctgttttgttttaaatataattaggaaagttttataattaatcacaaggctctagttttaataggcaaaacatgtttatgtgtaactgaagttagtcacatagtttaagaagttccttttagaagggcttaaaaataaaaatcctttagtagagcaacaaaattgtgtaacagtctcatttatttttaaagaaaaactgtagtattagtttatgaataaagaaaatagcttaaatttaaactaaaccgaatgagtccaaaaatagtgcagtatctgattatttcagttagataaataaactgtgagtgagatgtagaggcacactgggctgttctatattttaaaacattttcaacatctacaaaggcaagatgtctatcgaggaagacatcattgtgctctaagagagcagagaaaattaagtcacagagccaaggaaaagtagctgaagtactaagcaaatgaatactttctgcagcatctgttaacataaacattagaggtatgttgttagccatctgaggctaccgtctttgaattatacatttggatcagtggtttgaggttcagctgttggggaaatggaaatctctatgtattcttgttgattacttgctcttcagttcttcaagtgcatttccaaggactatgttttgttacacaacagattattatcactgaggcattagtaataatatcttgtccacctcctacactccactccccattgccttgttgtttcattttgtttttgtttttgagacaggatcttgctttgtcacctaggttggagtgtagtggtacagtcatagctaactgcagccttgatctcctgagcttaagcaatccttctacctcagcctctcgagtagctgggattacaggcacgtgccaccacacttggctgatttttttatttttatttttagtggagatgaagtcttgctatattcccaggctggtctcaaactcctgagctgaagcagtcctcttgcctgggcctccctaagtgctgggattacagacttgagccactgcgcccagcccactctgaattgttttatagccattcccaaatgttaatgaaagtccaaattgggggaaaaagagttcctgcagaaaatgatagtgtatatttacatatacatgtcttttctgtgtctcttcactttggtaattaatataattgtggatctttgacactgattttagattacttaataaagaatgtatttaagtgtagtgcagaatagattatctttaatgtttgcaaaaagtggtacactgtttagtaatatttaggtaaaatggtaagattgccagtgtaatgggcaggttatatgtctggaaataggctcagcaggaagttaaaggaatcatggcctatactgctgacagaagataaacaacatgcactatgaaacccactaattcagtctgggccctcttttaaacatttactagaagcctgtagatacggtcggtaactccagtgtacatagtagaatttatgtgcatattcaggaatttctatgagaaacttccacataataagattttgcggaagattcatgcttacaataaacagtaaaggaacagttttggttctggaaaacctagataagcatttatttccttacattaaataagaaattgacaaatgtatgtttaggtaaatatggtatagatgtttaggagacaaaaatgatgaatgaaaatacaatcataataaggaattttagaacttcagttattgcctcacaaatttattaagtgaatgaaaaatctaggaatttaaatggtttttagagtctttgcataaaacaatttttggctaaaaaaatgtcatctctgtctctctgaacggtggtagtcacatgaaatgacacagtgaaaagatccagaattgtctcagccaactcccagcctcaattgtaccaccaaagacttacctcacatgggctgtaaggagtaaaaatgtagtaatatgttttctaaagtaataaaatggccaaatgtatggggctaactatactaaggaatagataaaaccataggataacaatggcactgtgttactcagtggtaaaataattaaacatatttatagtaaaagcaagaacatgttctagagtcaaatgtaaattttgtatacacttttaagataactatatgacattaaaggaagttgatggttagggcataaaggtcacctgttgttcaccctccttgaatgttccaggtacctttggctgaacagtttgagaggccttgaggagcctcagagataatatccaagggagaaaagtcagtgatccatgtacatttatcactgcatatctcttaataccttttttccccttgctcaagcgattgttttacatttctaagtgatgtagagcatcagtaaggtgcttaggttagcctttgaataacaagcttcttttcacaccataggtttcatgatcaaaaattagcactgggatgtctgcttgcactattcccaggtttgcttcctcggttcttcatatcatccagacccctgaactggaaatatcttgttaactctgcactgtttaatattctttggaaattaaactacttgggcatgtttagagctcaaatggaatctatgcgttttgcttgacaaggtcgttggttgctttttagagcttacatattgaaaatcatgtttgcagccagctgatagagaaatttccgtgtatcaaagcattgttgtgatgaaaccacctctgttgtgaagatcacctgaaataatgtgtgtgagagccctgtggaaaccaaaaagtgctgtgggcatttgaacactagactgttatgattagtgatgaacagcatctcagcctgccaagggagaacatgaaactggagaacaaatttggttccaggagcaaggggaaatgtaatgtggaatctcacagtttggggtttgtaattgggatccgttgctattataagaaaatgtagttcaaaagacacaggattttctgttaaaatcaatgaagttaaaagagcagctgcttgtaaaagttaattttatttgacttggtcccagtaataaaagtgatagttctgttgaacaacctgttctctctaaagctatatctttttgttgctgtgaggtctgtttaaataaattgttgccttttgattatttaaaaaaattttcctgatctataaattgtttatctcttagaatacatacataagcataacctatgcatctttaatttactagaaaagtgttggcattctagattttgagttggcactcttgggagttataaaatgcagtaggagccatctcaaatcttgtatgaaatgaggagaatgcaaagacattttgaaaaatattccttatttattttccattaaaataaacttaaatttggttctttgtcattttacataataaataatatttatctctttgtcatttgtaaataataaatgccactgccctaataccactgtaagagagtactattctggttctttcaataggcaatattaaatgaaaacaagggacctaaattgtactgattacctgtctgggatttcttgacaattcctcttgaattgtcattcctcttgagtttttgtaaggaagctgaagtgagtggtagagggtaaaaacaccagagaacaaaattgagcaatattttccaagtgagcattgttttcctgtcatttttatgtgttttgatttcaccagtgttgggtgaacagttcagagaaggggtttattattttaaaatgaagccaccctcttgttcttaattttcaacagattgggccacctttgcttttaaaatgtctgttgactctttaagaaccatttaccatatttgcttacgtatttacctccttgtgtattcttgttccctcccttcgtgctcatcatttgaaaaagaaaatcatgaaaaatatgttcttcctacaggcccttttcaatcctttcaaacaattctacttcaaaatagcaattggctaacagcagaatatcctttagggggttttaagagcaacagtcagcttcatagctggaggcagaggaacattttttcacaaagtgaaattcatttattctagatgtacaacaagatttataggagctactggttacgctttctaactaatctataattgcttaaaatcaatgttacacaacttcaagtctatcggcaaaatttcttgttccagctaagaatggcacatgcctgacagatatttctaatctcccattccttatccagagcagacatttcaatctgtactgtttccttgatgtggcttgtaactgatggcatttaggacatacttcttgagggaacaacagaaacaaggaggtcattttcaccttctcctggctccttctcttctgaagcaggccataaaccctagtcaacctcctcctgaggtggttataaaaccttcattagagatatgcccttcccaaacctgtcttatctctgaagacacagggacaaagagaatattctgaacaaacaggacttgctaagttccccccagttaattaccattagactataccctttggtccttcagtcatacttctgcacaactgtccataaaaaacacatgtttccctgtttctttgggtcttcatttatgaaggctcccacatcacataaaactttaatttgtatgctttactcttgttaatctgtcttttgttataggactctcagtcatgaacctagtgatgggaaagaaagataatactttttcttctctacagaatgaaccctcaacatactgctctaatgagctactagttaatgacagttggacatccctgttttatgcatataatatgggaaggtttagccagttcatggctttatctgctacttatttgctgataacacttaaatctaaatgtaaatctctcctgatctctacatccatatatatttagttacctcttagttagttgaaagcacctcaaattcagcatgcctaaaatgaaacttacaattttccttcatttcccaccttcctcttctgtagccactgtcttgcagctgatagaactatctacctacctgcacgtcctctccatcttccccttctctgacagtcagttctgtggagcatacctttacatatttcttatgtacatgtcttcctttctgtcgctattgcctctgccataatttggctcttcatcttggatccctagatcactgcatgtgccacccttttgacctctttgcctctactttagtttgctctcctccaagccgttcctcaccctgctagaaaataagtcagttttcactctctgcctctcttgaactattgcaaacacaaatgtatgcaaaatagtagaacattcgtgtatttacctctaggaattaaccagtgtcgacatattgtcaacctaaaataatcaaaagggtcagagtctagttgaaagaaggtttactcaagcaaaaagtttggactagccacaggggaaacacagactccaaagaatggaaggcagtgttccaaagtgtaaaagcataggattgcttatatagacaaaacgtagggaagtttaacccaattttaacatctttctatgttaggcttaatgcatacttacaatgatttgattagttaaggcgctctttttctttctggaaagatatttaacgttccacattgaagatgtaactgtcatggagtcttgggtgccatctggtctgagttaggtaaggacaataaagaaggccagttaatctgtaacaaaggtcagtgattggaagcagggaggtttggtctctcctagttatttacagaaccaatacaatgaaaagagagataagctaaaatctaagaaacagaattgcaaacatgttaagtgattcagtctccagagctttacttcttcctcggcataaatttagagggttgtatttgcttcagaactttcttgcattgaatccaaggaaaggatgagaatatctttgataaaaccaaagctttcactctccctagtctcctttcctcttgcttttcctacgtgcaaccaaaattgcttcctaccccacttgttaaaaagtgttattgaatagagaatgtaattctaacaattaccttttccatcctgatcaagtttatttttagctatattaaacagatctaatttaagagggaagtctaaaaagaaaaaatattttctgtttgctttactcttgaaaagatatgacaagcatgctttatatccagatttttctatatttgagtagatttaccttataattactattggatttcagttttgttttttttttttttttttttttttggagacagagttttgctcttgtcagccaggctggactacagtggtgtgatctctgctcactacaacctctgcctcccaggttcaagcgattatcctgcctcagcctcctgagtagctgggattacaggcgcccgccaccacgccgagctagtttttgtatttttagtagagatggggtttcaccatcttgtccaggctggtctcaaactcctgacctcaggtgatccactcgccttggcctcccaaagttctgggaatacaggcatgagccaccgtgcctggctggatttcagtgtttttaaaactttatgtcctttttaggaggggtgttttgagacagatattttggactctctttcaaaataactaacctaccaggaactacaagttatttatttagcaataatatcttgaaaggtgtttaaacacacacttttattttagcattgtgatttaaataacaaaggctatttctttacattggtctgagtcttatttgaatagagtcatatttacactgtctgttccttagttactttatataaatttttgaagcagtctcagtcttggctggttaggcttttttgttcttttaaatggctgttcactgtaaacgactttgaactttgtgtgtttgaaatttttaataatgttgggaaaatatatattcagccaatatttctgctttatttctaacaatcaattggtgacccaaccccttccaccaaaaaccagagagacatagattagaaggaaggaactatgtcatggtcactcttttggtagtgactgttatagcatattttaagaaataaaagtaaaattttaagccccccagccaagggaaccctggagaaaccttggaagttgagttcccagccatgatggaatgggaggttggacatgcctcattatgccccatcccttgctaactgccattaggctaaacagaaatgagccctcaggaaagactcattccatccctgatatcaaccaaccacctgatgctcacccttccctttgcagtttccacccaacagtttaccaacattccctcctgacaagagactactaactacagagtggttcaggccagtctatggaggatgcgcagtgagggttttcatattctctgcttcactatccgatgccggaaagctccacctttggatcatgctaatgccgccatttttttacacgtgactcatgaagggacgtgaaccttaattgcatgtgtgcatgcttctcctctcataaatattcatgactcctcctatagcttattaaatatgtgtatttggctaccctgttcagcataaattcctgtttcctttgctcctccctcaaagtgtctgtttctggcttctgggcagaggctacacttcctagtctatcagaatggccatccggcaggctgcaaccctttatgagaaataaagcttctctttccagatttatgaacctcatcatttttcagctgacaatccataatttgagttttggactgctagttttgggttacttgtttcttttgaaccaggaggtcacagtttcaactacattgcagggtagtgcacttgccctcattttaacagaaggacttggatattccatttagctggaaatgaaaagagaaacgcgtatgactcctctacctgataggacatgtttactaatgaaaacagttagaaatacaagatcaaaaggatcggtgtctagggcagacttttctaaacttatgcctctgttggaaatatttcagaggggtaaaccttacattcactctacaaaacttagtgagtatatactgcatgccataccatgggctgttctaagcagtcgggggaaagtgatgacaagatagaagaggttcctgccctgacagagcttatattcttgtgatgagagaaagacacagtaagaaaattaatcagacaatttcagatagtgataaatgttgtgaggtacctgagtaatagctagaataccctgctgctttacgaagggttagggaatacctactgctttaccaaacctttgttgggaaagtatagatttagtcaatatttctgctttatttctaacaatcatttagtgacccagccccctccaccaaaaatcagagagacatagattagaaggaaggaactatggctgggtgcagtggctcatgtgtacgatcccagcactttgggaggccgatgcgggtggatcacttgaggtcaggagttcgagaccagcctggacaacatggtgaaaccccatctctactaaaaatacagaaattagctgggcatggtggcacacacctgtaatcctagttactcaggaggctgaggcaggagaattgcttgaatgcgggaggcggaggttggaggttgcagtgggccaagatcacaccactgcactccatcctgggtgacaaagcaaggctctgtcttaaaaaaaaaaaaaagaaggaactatgttgttgtcagtcttttggtggtgcgtgttatagtatatcttgagaaataaaattctaaacccttggtaaagcatcagttactctttaccaaaggttagggaaggcctctgtgaggaggtgatatttgagccaaatcccaaatgatgtgaagaaattttccatgaaaaaatttgggaatcttgaagactgaaaatctgtgaggtaaagtgaatcttgaatagtgctgtcctgttttgaggggtgagggactcaaaggagacagaagtgctctgagattaggtgaaggcttctggccatgccagcaactagttgcttatggcctgaggaacctgctttcctcatgcataaaatgacaaagttggaccaggcacctccagactctcttttgtctcttgtactttgaatttatttgacatttattggcatttttctttatttttatgatttacaagggtacaagtgtagttttgttacatggatatattgtgtagtggtgaagtctagagtaaccacctgatttattggcatttaatggaggattattagttggtaaaaatgcattatttttgtaaccagatagatgtcaaagggcaaaatttacccagtaatactaatttttaaaatgagatttatataagagttagtgatctgttatacttgtctaaaaacagtggaaactgtattagttaattcagtgggctaatatagttttaataatgaaaggacatcttaactcacccctaacctttcaacaataatgagaaataagctataagttatgccaaattgtatgatggttttcatgaaatagcccaaacttagacaactcatttaggctttgcagatgcaaactgtgatagatcttccttctctttcattcttggtgatttatgtgtccggtacattgttgtgttttctataaaaagaaaaaaaaattaaaacatagttggaagccaaagtcgatttaacctggatagatatagctttctagttgtagaggaaatgctaaaaatctcattgtggcagtgtattgctttcttggaaggcttgataattgttacttagtttagttttgatttatatttagttttgctcaaagcaggaatttgaaaagctttatgaaacatagacatatactttcatttttatcaattaatgaaattacatacttgctaaactaaacatctgttgtgttgcaagtgctagggatgcggttaccactcacagtccagtggatgtaagtagtaactacgttagctcagagaaaaatttcagaagaaatggagccaacagttcctaaaatgaagtttgcattctgtcagcaaaaggttagcagatgggtttgccactttaaagagctttggaatagctttattatttcatatccttaacatgaagagatgcatgctctttttgtaaatgctaattgttttaaaagttgaaaagaaaacctttggaaaactcagaaatcttccttgaaataattttactcagagcattggcctctccctggtttaggaatcattcttgccagagattcaatctcgaaagtaagttggaggtgggaaggggaggatgggagaactcaaatcatcgagcacatgtgttccagaaaactggagctatggaaaatttctacctgatgtgccgtcattgtgttttgtggaattggcagaagctgtatagtcagtcaatcattctgtgcctattgtttcagtaatgccgcctaaaaggaaaattttaagaaaatgtctgatgaaagactgatgtaataactttaccctcggagccagagggaattactacatgattttaattaggggtgtggttaattttcattttgaaaatttcactctgaccttggtataaattagggaaggggcaagaatggcagcagaaacaacagtggagatgtattaatagtttagggaaaaggaaatgaagactgaaattaagatgaaggggtagatgtgaaaatctttcctatgtggacttaacagatgtctagaatattttgctgttactgaggtgtttttcgtttgcctctattagaaagcatactatatagattgacagaagtgactgaaaaagcccactctgtctgctctgttttcagagcactgacttttgaaatgtctagataaatcatttaaatcgttttagaacacagctttggttctgagacatgaaatcttttgaacaatgaaaatggcactttgtaacaggatttgacattaacagataaaggatgtattaaagtattaaagtgttttgtttatagaatttgataaccttgataacatcttatatgttacatatatgttacttagtatttttttaatacttagtacttagtattttaatacttagtatttttcagggatactgaaagtctgttgattgtgctaaaattgcagcagattaattgtctctattgtattttaaattagtaactgtcgacatgttgactcttgtacaaaattgggaaagcttctccattattattagaatatggcactttggtcaactttttttcaaaaatataaaagatatttttagatgatagttttatttgcataatataaaaattagatttgatgaattaaatgttttccatttttaggaaattgtaattaatgtatgaaaaaaattaaaaagagagcatacactatataaacccaaaagatatctttcagtttgttgcttgtcttaaggttctttttcgtgaattgttaaatgattgattagtaaaatatgagaaccattttgatcataattgaatcttgaagagatttatcttttatttttgttttgatgttttattaagtttacctcaagctatctgattactttgaaagaatgtcgttaatttccttgtgtcaaattcttttaaaaaggcattctcttaagaacagagaagaaaatagagatacatagttatataattaatattattgtaataaaatagatcataaattcacattttgatgatatgctgtcaagttggtacacagtattggctctgacttcttatttcctagctcaatttgaggtcatatttcaatattaaatactttgagttgcttctgtatacttaaaagatatccttggttccttatagtcatgtggctgacagaataaagtacatacacttctgtatgtaaccagtttcacagtggcttagctataaatcagaatttatctttccaatttattcatcatcttaggactcggtgctacaagataggttgttatacagttttacatttagaagtttttccttttttatttacaaagataatagtctcataagtgaatgctttttcatgaactcaggacactcccttttactctctgttttgctcacctttttctttacttttaaacttagtgacataccctatgtccttagaaccatgtagctagctttgatcatgtaatgtgtcaggtttttatataatttcttgatttgaaaaaagagaaatagaaccttatatttttaagtattgcctccctatttgcccttcagctcgttttacatttagtattcaaatatgttcggtgttcggcctttgctgtttttactaattttcttccctgcttttagttaacagccaggtccttgcctgctgtgcagtctgatgaaagacttcagcctctgctcaatcacctcaggtaatctaaaggcacagccttgttatgcttataaatccaagtgcagtaaagtgaataaagtatattaaagtggtgaaaccgcttcaattactaaaaacttatttttttttcttgctttcattccattattcaaattgaagttcttagtaccatgtacttgttacccttgactttagggcactgtagaaagctcttttaattcaacaacagtgtgctgaactgcttgacaagtttaagttaaatgagtagagataactaactttacagaaagatctcaaatgaatgagctatttacgtaaatacaaggttaaggcatacttttattgaggatagatgagttagatggagtttgtttctaaatacaaaaataatatagtctcattatttaaaaaataaagttagaaaatacaggaaaggaaaaggaaaaacctatcattactactcagaaataatatttatcttttctatgttttttaattttaattttaattttttattttttgagatggaatcttgctctgtcgcccaggctagagtgcagtggtgcgatctccgctcactgcaacctccgcctcccagattcaagcaattcttgtgcctcagcttcccaagtagctaggattacaggtgtggggcacctcgcctgtttaatttttgtatttttagtagagacagggtttcgccatattggccagactggtctcgaactcctgacctcaggtgatcacctgcctcagcctcccaaagtgctgggattacaggcataagccactgcaccctgccctttctatgtttttgttgttgttgttgtcgttgttgtttttcacttagtgttgaaattatagtttatgtgactattttttccatttttataaatattgtaatattttttcccttagtattaaaatctttctaaaaacattattgttagtgactacattatattttcttgtatatctgtactatagcatattcatctccctttgggaagctttagaccatttccagttttttattactactataaaataatgctatatgttaacctttatttgtattttagatcattttcttagggtaggttttcagaattgggattactttgtcaaagcgtgtgaaccattttaaagatttaagtgtatacgtatatttctttttcaaaatcttattctacctatacactcatatttgtaaaagactgccatgtaactatactctgaacaagatagggcagtcaaaaccgttgctaataggttagacatagagatactgttgtgatcctgtgcattttgttggtaataataattcattttccttatttgtgaggtgggattaactacctgtattctttgcttacttattgatagcatctcctgatcttatttgcttttacatactttaaaggatagtgactctttgttgtatttgttacatagtttttttctaaaattctaaaattgtattagtcaacatacctacatattcaggttttatgtagtcaagcaccaatagtgttttcctttatggttttgaaaaattctttttaaacttctctttcagaagtgtggatagatttttactttcaccagaaagttttagttttagttttctttttctttcttagtatttctttatttttcctttctttcttcctcccctctccactttccttgccttttcttcctgctctccagtaactgttccttcccagacagctttttaacctttgtataattgttttgttgggttacgaagaagttgtaacctttgtgtaattgttttgttgggttgatcaagtctaatatttcagcagggactgaatagcatacatttttatgtataacaacatttatacatgattgttaaatttactagagctctgtgttagtgagttaagaatctcagaaattatttttgagtctcttgcttaatgcccacctgccacattcaactctgttggcaattttatctcttaagtatatctcttgctatcatagcatcttgtctgcttgctttgccctttctgatatatttcacagcattgccatatgtgtttatattattcattggcttaagacccatctctgcctctccaatttcattctggaggaagtccgaatttcttagcctggcataagaagtccttctggaagaggcctgggctatctgtctctttggactcctgttttaacactgagatcctaatttcaccaaatgccgtgaagttcctttaacacaacatgatttttgctcactcacctctacggcgttacaaatatttttccttctgccacttctatttatgtaaatttgtagatatataatatatatataattttaaaacattttaaatgtatttaatataattttaaggtattttaaatgtatttaatttaattttaaaacattttaaatatataatataaatatatattttagaaatatatatttgaaatatattgtagatgtatataaatatgcaaatctatttatattctcctcatgctccacttttataacaacttttgcttgtcttttaaaactcatctcaaacattacctcttctgataagttttccctgaccattaattagttcacctccgtagtctgaattggaagtcttttatagatattttcataatatcccatgccttcctctgtattacagaatttgtgatattgttattgtttgtttactgtttgatttctccattatagtatgcttgaaagcttgtaaagtgatgttcatatttgtattttcaatagcggagacagtatctggtgtgtgataggtattatatgttttgttgaatgaatgaatacaagttatattagtgaaattttcttgttttttctgcataaagtttttataatttataaatcataatgtcaaattttttttcctagaaaaccactggttcaaaaggtaaaaacctaaagggtagaatctagcttctagttaatctcacagttgattctgagagataatgatggattctccttcctccatctgagtatggtaattgccagctagaatttagattaactactggcacatctctttgagtccttgaaagttgcacaaactgtacattcatttaagggcttttattctctgtggatttcactcatgactggttgctaggcaaccaggactggatgctacatgtaatgtgcacccactgctgttgctttattattattattaaacaaaacggtttctcattttattaccatgtcagagacatgtatatgtcgggtggcagctgatgtgcatagtttgacacttcctgttctacaaagtaaccttgtataacgcctttcaagaatattgaattgttgctttcgcttgtctaaatgtaatgtttttattttatcttccttttgcttagttctaaataggaaataatattatttggtttgagagattttaataataattttgttagaaaaaaattgatttgcatgaactgtgtaatttaaatgttacctagaggcggatggacattaggaggttgttaccgagatcattattaggtctaattttgtttattgcctctaatgaagaaagaggaatgatgagtagcattttaattaaatttgtcaataaaactaatttgggagataatacaaatacctgtaaaaattgaagtagcaatacagagaaattctcaaatcattttacaggatttagagactcaaagagaattaaggtaacactgccaatcaaataatctagaatatcgcttaacaatatatattattttgagactgcagaagtgatgtgtccaaactgttttagttgaatccaattctcaagtacagaaaaacatcgtgcttcaatatcttatggcagtacaactgtgtttttaattcattagtatcgtccattcactcattaattacttagtgcccgttatgtgcttagaatttaaagaaaacacacaatctctgttttcagggagttgggtttgatttcatttgagagataggcacttgaacaagttataaaatttgtatcattttctatcagaattaaatacaatgtacataattttgttaattgaactgtctccctcgtggaattatctcctcaagtaatcgggccataacttaattgttttggtttccgtgcattctagcacagtggctcacagtgggagctcagattggactgaaatttattctttttttgttgttttattcttagtcagctttctcaggctgaatggactgaactgtaatctcacttgagggataatattgtcattaactaagaaggagaataaagaaaggaagacaaggcaattagggaatgaatatgattgcttagatggtaatttcagtagtttcagacattttaagcttgagatacccgtggggacctatgtgggggatgtttagtaagcagttcaatacagacccacagttgaagagtgaggtttacatcagggagacatttgctaatcatcactgtgcaggtcttggttaaaataaagggaatggttgagatcacccaggaagagagtatagagagacaagaaaagggtgaagggttctgaatcgaacccacagaatatcagtgtttaaatgacttgtgatgggcagtgtgggagttgggatatgagaaaccggtaaaaatatcagggaggagccttgaaccaaaaaggatagtggtatgatgggtgctaatggtatggatacaagtccaagtcttatgaggatttgaggaataaataagaaatgaggctgtggagatatagggaataggctactcttggtagagcttaattctgaggacatgtaaggaaaaaggactgcatctgtgagcttcatggttgaagaaagtgttttattttttccttaagattggtaagatgagcatatttacaggttaaggcagaaatgagtagtatgggagtaagacggactaattgaaggggcaatgttttaggaggggtagaaggggataggccaggaaatcaaactgactggagtttaaaaagtactttccaatctagctttttggtgcatactcagaacaatccagtgtggatggtagatggttatttatcataatccctattttacaggttggtgatggagcctcatgatgttctcattaagaaaacctaatttttctttttctttttttttttttttttttttgagacaaagtctcactctgtcgcccaggctggagtgcaatggcatgatctcagcttactgcaacctcctcctcctgggttcaagcgattcttctgcctcagcttcctgagtagctgggactacaggcatgtgccaccacatccaactaattttttatttttagtagggatggggtttcatcatgttggccagactggtctctaactccagacctcaggtgttctgcctgcctcggcctcccaaagtgttgggattacaggtgtgagccactgtgctcaccgtgcaccagccaagaaaacctgatttttctaatgaaaaatactgcctttccctctcctcaaaagagatgaattaattatttcataagactataccatttttcaaaattgataccaggaacttttctattggaagaaataaacttacttagacttacaataatatgaagtttagagagaatttgtataaatcattatttctgctttcaccaaattgcatatgattagatatgtaatctaaggagcctgcatctcattgtggctttactgtcattcttatggttatatatcactgcattttctagggtgaattatatcgttcactgatttggtagtttggagatacataaaggtcttggaatatgttcccatgaatgtagaagtttattgtaaataagtatctttgctatcctaatgatggtaccatgggataatatttataaaaatggcattaggctagcaagtgtgcatgataaagatgtttatttttatttattatctcacttataaatatgaagtataaataggtacaactagagaggaaaacttgcagcccatattatacatgtgataacttttagttgtatgattgagaatttttcccccttaaaaataacacctacagtgtatgtatcttcctcctttatcccttgacttcaagatatgaagtgcattgggggacagcatattataagtcactgtaatagttgctattattggctggacgcggcagcttatgcctgtaatcccagcactttgggaggctgaggcaggcagatcacttgaggccaggagttcgagaccagcctgtctctactaaaaatacaaaaattagcccactgtggtggtgcacacctgtaatcccagctgctcaggaggctgaggcaggagaatcacttgaacctaggaggcagaggttgtagtgagccaggatcgcgccactgcactccaggctgggcaacagagcaagattctgtctcaaaaaaaaaaaaattgttattatttaatgttttgtcattaaagaataactcatttttaaaatgtgtatctgtcacaccacaattttgtgagcatatttcagcccaagaatgaattagaaatcaaacaaagataaagcaagctaagacaagtattacttatagtaagtacttggactgcatcatatggattaacttttagtgcatactgattttgcaagcagatgtttatacaaactgttattttaaaatcatttaaagtaataaaagcatcttccttcagttggtattattactacttttgtaaaattccttttccgaaggcagtacattttgttaatatgcacacatttctacttatttttctaaagaatatgctttcacaaattttttatcagacatataatctctgtaagaaagcttttcttactatccaaagtggtacagctatcattgttttctttttgaattagttctcattttgaaatcagaaaattgtgtgggcattcatgtgtctattgtggtaaatatgaaaataaacgccagaaaatggtttagtagataggggcttcatcagttgagggctgaaatgaaagcctcattagcctggtccacatgcttcagttgtttgttagctctttctcatcacctgtttccagtctctggcagtaccttgaacatttatttccttttctacatgcagcagcacaaacttttagttcactgattatagtgaaggttttccaggtgctgtgtaagatattaataaattagaatatattgttttccattgtcacctttgaattacaattttttcacatctgtatggaaaatgttaatgccttcttagaggtatacttgtgaatagtcagcattttgttagaatcagcccgttgtgttaagggcactataattggtactgattatgtacaaaataactaatagatgtggtcccttaactcaaggtgcttatatttttaaggggaaagaggaccaaaatttataaatagtttccccctccccacccacacacatacccaaagctgcactggaatagttgctgcaagttaagtagatagtaaagagagtgataggaagtcttatgagaagcagtatctgcatgtggattatgttacaaatttaatgtcatttaatgtttttggtaaaatgtatagtcacaatatacaaaatcacctccctccctaatgcaaccaacactaagcttcttttgtgaacttgatgcatactttaattataaagtggttaacttttaaaattttcacttaatacgttataactaggtaataaagtagaaaattgattttcatgactccaattttaagtatctgcataatagtcaatcaagaatagatatatctacttttacttagccattaccattttatcagatatgtatagcttttgggattgaataaacctgtggcaaaaaattatagaatgtgaacagtttctgtgtgttcagccaaagtaactgagaagaaatactgtagtaactttatgtagaaggaattgcatcatagatgttttccagcagatcagatggagataagaacaaagaacagcagcagcctaggtggtgtatagctttgaaaatacagggaagttcattagtctaaaaatgccatcttgcccaagtgagaaagtggcagatttcttaacaagtgaacgagtgacttgaaataggtggaattgaggaagccagatgttaaagcttattagcgtgtgtagattagagcctttatagccattttttcaaacactcccttagaatatttaaaaatcactcgtgtcatatgtctgtgtgcgtaagtacattgtatatatattccctgatatttagcaatgacactagcatttttatataaagaaaataaaaagtgaccagtgtattagttttctattccagccttaacaaatgccacacatttagtggattaaaacaatgcccatttattatctcacagtctgtaggttagaaatcggacatgggtcttgccaggctaaaatcaaggtgtcagcaaggcttatattccttaccggaggctctggggaagaatttacttccaaggttatttaagttgttggagatcctgtttttatgctggctgtcagttgaagcctggtctttcctcctagaggctgcccacattccttctcatgctttccatgatttcctagaggcctctgaagtccttgcctgtgggtcccatctcagagccttcccatgcttcagatctctctaacttatgctgctgtgtcacactgcctccaacctgagaaagttttctgcttttaaaggcccgtgcgattagatcagactacagggatatccaggataatcttttcatctaagatccttaaccttaattacatctgcagagccccttttaccatgtaacctaacacattcagaggacccaggaattagagcatatgtggagggtcactgattcggcctcttatagtgaaggttttcttttgaggtggtagtatggagtgaaaacagctttttgtatcacttttcatcaattttacacgtaagtcaccattcttaatttatgtagaatactaacgtttcctggagttttgtagttaatttactttactagtttaatatatcttaaagttgaaaaaaggtataagaaatgagttcttaacagaaatataaaaagttactgattttctttttaatgctattgaaggaagatagaaaaatctttcttgtcttatcaaccagctacctagaacaaggcaaataaacactgcagtaaatagtagactttgtaatgaggttacatatagtggctgagatgtactgaggtactttatgtgagagctgttcagtaatacatgctcacacaccttttagcattctaagagtttgttttatttattgtttattggacacatattaaaggaactcttactggttgcctcacgtgatgttaggttctagggatacatttatttctgcctttgtaggactgaatagttatcagtaaaaagagaagtttaactaaagtaattataataaatcatgatgactcttggcatagtggaggtatgtgattacatgagagcacgtagcatcctggaaataatgaaactttgcttgtcacagtggtcttgtagcttatctccaaccagacattgtagatttcccttagtcctctgactccaaagtttctcaggaatttctggattgtggatacaggatactgggagccttgtatgtatgcagtaagtcaagaaccaagatactgctggaaagtgaaatttatgatttcttatgcttttttaatagttttaatatctgcagttgttaaatttcctattcttcactcattgggtttctttaaaacattgatcgctctctggttaagttacaaaggaaaattagtgattttacactgtgttagtcatgaaacactaacagtacaaaataataatgatgttatgggaaataatattcttaaaaggcctgagaaagcattgtggcagtattggtgatatattagcaacaaaaagcaacttgttgaatgctatgtaatagaactttctgtgatgatggaagtgttctatacctgtactgtttaatctggtagccaatagccacttacagctattgagcatttgaaacatggctagtgctactaaagaactgaattttaaattttatttaattttaattaattaaaattttaatttcagcaaccaattttagttaatggtatctgtatttgatagtgtagttccatattgtattggaaatttatttaaataattacatattttttaaaaatcatagtagtggggcttagagtttcaaatctgaggtagccctggaaaagctatatgtatggagctgttataagcaattgtggccactgagggtcatgaggctcctaagtcagggcagctctcacatctactggtggggattttgcctctgtacctgaatgagctgtccacctgtgcaggactgtggtaaggattccatggaagaggaatacttgaagctgcccagctagcaagctgtgattcctgtcctggatctttccaagtaaactgatgccacaaggggtctatggcatagtcatgtgagtctaaatgtttagttaacctaagagcaccccctggcattccagaaccaattaacctttatttactcagagtaaacacaaaacaaaattaataaattgagctgaggaaaggcagactaccaagactcaccaaaagtttaatgcactctcaattgtttctaattactatttggaaagtagtgctagaaaggataatacaagattaattttaaatgcccacttttagtagcggtatcttggttcttgacttactgcatacatacaatctaccaggaacagtcatcaaatgtgtacagtggtggaaacaaacaaaaatgtgtatagcggtgcatcttctcaggtcttattgaggtgtgtccttaatcatccaatgtaaagtcaccctcacaagtgctttataatattttctcactatgttttgttttcttctcagcaacatcactagttggaatgatcgttttaatttgtttgcttgttcagtatttttttgcctagggtatgagctccattagatgaaggaatttggccatcttgtttaccactgtctccccattacttataagaatggcataataggacctcagtaaacacttgaatgaatgaacaaatgaatgaatggatgagtgaattatagaaactgtcaggttaaaaaattttacctttaattccgttttccaagctgctaaatattgagactgaatgagatggtaatttggacaaaaagctgatggattttctgttatttccaaaggataactatgataaagaaatgctttttatctttgtagaaatgtactgctgtttttatcttttgttttgggacataagactcttctttatgcaattaggaactaatcatggaggacagagagtactttctattcctctgtgtgatctcagaagtgctccctctttttcttaccaatgacttattattggggaacctgccctgatattcacgtaggttcttttctattttccttaagcgtcggccagcttgagaaataaagggacagagtacaaaagagagaaattttaaagctgggtgtccgggggagacatcacatgtcggtaggttccgtgatgccccacaagccgcaaaaaccagcaagtttttattagggattttcaaaaggggagggagtgtgcgaataggtgtgggtcacagacattaagtactttacaaggtaatagaatatcacaaggcaagtggaggctgggcgagatcacaggaccacaggaccgaggtgaaattaaaattgctaatgaagttttgggcaccattgttattgatagcatcttatcaggagacagggtttttgagatcaaccggtctgaccaaaatttattaggcgggaatttcctcttcctaataagcctgggagcgctatgggagactggggtctatttcacccctgcagtctccaccataagagatggctacgcccaggggggccgttcataggcctacccccaggcgcgcattctctttctcagggatgtttcttgctgagaaaaggaattcagcgatatttctcccatttgtttttgaaagaagagaaatatggctctgttctgcccggctcaccggcggtcagagtttaaggttctctctcttattcactgagcaattgctgttatcttgttcttttttcaaggtgcccagatttcatattgctcaaacacacgtgctgtacaatttgtgcagttaatgcaattattacagggtcctgaggcgacgtcctcctcagctgacaggattaagagattaaagtaaagacaggcataggaaatcacaaggttattgattggggaagtgataagtgtccatgaaatcttaataatttatgcttagagattgcagtaaagacaggcgtaagaaattataaaagtattaatttgggcaactaataaatgtccatgaaatcttcacaatccacgttcttctgccatggcttcagctggtccctctgtttggggttccttacttcccgcaacaacttattcaaatgttgaccacttgtattcaaaaacaaaaccagcaacaaaactgttacataccttgctcttttgatctatgaaatgaaacccttaaacattatgaggcattgtcaatggctatgtgagactgaagtggcgtataaggaaaggatgtaatgtgactgttggactgtgacttttaataataatcctcattaactgttccagcaccccctaccaaagctcccaaaacattgtggcagttagtggggaacaaatgtgaggggattatcctagaatgccataaatgtgtaatagctcatctcagtagcattccactttgtgtaaattatttgtgggggaatgggaagacgttgtccatcattttaacgtattaattttgctggatgttggaactttattccctcgacctctcactttttcatgactagcctattatgaatcctttctttattgtagtcatttgactatcctggacccaacccaaaaccaaaaccatctgtatttgggttcattatattactagaatatatactaagaatatagagagtaaaggaacataaaatttttactcatgaaaatagatatgtttgttgggggtcttaaagttatatggtgaaaataccagtgtaaagctgtagtttgaatatatgttacaggggtgtatgtgtgtattttacttttaaaatcaattttattgaggtacaatttatacacaaaaaatccacccatttaaagggtatagttcaatgtcttttgacaaatgtacagatatttttatagaaaaatgagatgcaactttcacttatcttggagttcattggattttggttataacttggaataaataggaaaatatgggccacatggggaagatgagggaaacataaaataaaatagcagttgtaccatttatagttcctacctgatatggaaacccgtatggtttccatggatattttagcctcttggaatcatacaatttctcccagttataaagaaaaatagatcattatactgcatgttgtctgatggtagttttctgcggagacttttttttaaataaagttgaataaaatttatgcttgtggaaaaataatctacattcaaccaatttaaaacagaattttattgattgtgttctcatttggaataactgcagggaaaatcacctgggctaatacaagttggatatcatttactagggatttagctggagaaaaaaaacccaaactcatttcaatttccgtggtgacagctgttgactgaattttcctgtgatatccttcactgcaggaaatgatatattgtagctttggttcctttgatttcctacccacccaacaaatccaaagtgcagggactgtgctttctaaatgtctgagtggcttagtttatgtggatagggtttgtttttttttttttaacaccctaagtgggtaaaattgtgattgcaaaaaatagatatatgggtaatgtacagaaacatttatttcctctttctgaaattgtttttccatttgtgctattattacacctggctttatgtgaaaaggctgtattggaacttggtatacttttatggaatgatgtaggagattacagttcattttgaaagatgtattagcttactttttaatggtccaaataaatatgtttctttgatgcagagatcagttttgattatttgtgatgctttcttcactgcttttttattttatgctagtttaaaaaatatgataaactataacctgccagatagaaaggagtaaatggtgttaacctctttaggcttaagaatactgggaaatgcttgacaaagaatggaaatatgttttatatgttattgtcttatgaacgtcagaaactctgtctgctggtggggagggagggcagagaaataccccctgaggatgagggaggaattctttccactctggcttaggattttgctgtaagccacatttgcatcctgtctattatggcttcttacaaatgagagaagaatggacagttgcaattaggtattgaggttgaggttggccaagcagccccaaagcctcgcagataaacatgtcacagctttctttgtccccagagaaacaattcaggttaccgccaagctaatcagaattcaagattgcttccctaatagtataaatggcaaactatgacttaaatataaaaacttgattcccaagtaaaatgttgtaaaaacaagcacaagcacttcctttagttggcctaattgcagcctgtattttgtttatgactggcagagattgatcttagtgcagcaaatagaagtcagggcaagtcatctggctattctataggtatacctagtcctccagagaactatttgattgttttatgtcattgtgtcctcactatacaataatgctatccagtagaatcataatgagagcaacaaatgtaagccacatgtataattatatataatttttaattactcagtgaaattaattttgataacataccttatttaactcttattcaaaatatcttttatttatttatttttttaagagatggggtctcactcttttgcccaggctcagctacttgaactcctaggctcaagtaatctttcttccttagcttcctgagtagctgtgactacagatatgtgccaccacacccagctcaaaatattttaatatgtaatcactatgaaaaattgtgaatgaaatattttacattttatgtactaagtctttgaaatccagtgtgtactttgtacttgttgaacatctcaatttagtttaagctacatttcaagtgctcaatggtcacatttggctaatggatactatataacagtaaagctttataaaaatggatttcatttaaatctctactgtttaagttgaatatttgtacttcggacacttcctaaaaatgtaaatatagactataatgatagactcacaaaatcttccagatatcaggttattcaaggacatctaaattctcctattaatactttgaggttaaacattttatgtgatagtatgaagaaggttggaaggaaattattttttctagtattcataggaagaaattggcgaacattaagaacagagaaaaaaaatccaaaatgtttaagaacaataaatttaggccgacatgatgatgatgtttattacaatttaagtgaaaaatactgtgataaacactacagacatttcatttgtcctcacaacaactttttgagagcagcacttttgtgatctgttttataatccctgttttaccagtgattaagatgaaagcaattaagaaatctttgcaaaatcacacagatagtgactgtatgcaaacttttgcatgactcttgaattctgaaacttaccctcttaatcacgcttctctatttattgcctggttcttttatgcctccatgattgccttgggcaaactggacttggagaaattatacaaatgaagagaagttgcagccaattcctaaagtgttgcaactattccactacttcctgtttactctgtcaaattttcatcagtagtctgaaaaggagaaaatgactggagttgtaatcacccatgaaaagctgacttttgccctcccattttgtcagtaatgccctgtggcatttatatcacagtagtggagctggtgaataccactcttggagctgaggtgtgataatccatcttctgctaacaatcagtgccacagcatgaaaagattattattatttttcttaaccagctaatcttgccatgagacccataaatccactttcatgtaatttctgctttttgttttcaactctgagtttcaacactcaaaaacaattccctgttgagtacctaagtgctcatattgatatttgtggtacattgaacaggacttaaatttctgttgtttctacaaagtccaggagtaggtctgcctttcactacaattcacagatcagatgtgtgcagatgtatctgtttcagatttatccttttatatatccatggtatttttgcgctgtacattagatgtttgtgagacagtatttgggggaaactctagtttagtgtggatgtgattaattatgccttgctgtcttggtcattccccaacccctgcattcaccaaaattagatggatttaattggatttaaaatgggatcatttaaatttggttgcgtaaatatgtgttttgtatgttttgaaagtcttaacctttctcttttcagcctataaattattgaaattctgttagctttataattttctgtttactgtgattttaagctatattggaaaactagccatgctggcctcttatgtttaatgagcgagataatatgagagggaaaagttcctcaggtgtgactgtgttttaattaagttttacgtaagtttattgaacaaatgcaaccattaaaagatgcttttggctgggcacggtggctcatgctggtaatcccagcactttgggaggtcgaggcgggctgatcacctgacatcaggagttcaagaccaacctgaccaacatggagaaatcccgtctctactaaaaatacaaaattagccaggcatggtggcacgtgcatgtaatcctagctactcgggaggctgaggcaggagaatcacttgaaccggggaggcagaggttgtggtgagccgagatcgtaccattgcactccagcctgggcaacaagagaaaaactctgtctcaaatttaaaaaaaaaaaaaaaaaaaaaaaaaaaaggatgcttttatatattttgtgtatcatgaattctcttatagcagaatatataatttaagaccatcacctcaaaacaaaacaaaaacaccagattacttttgtgtaggcagagtttgttatacacaattgcaaaattctgttttcttagaaggcactattatatgtacacttaggtgtttagaaacctggagaaaacctcaaattttcatgaaaacagaaacttagcactatattattacaaaggaaataggacttaaaggggtttttaaaattatattttaatggtctttgattaaagacctatctcaggacctgcctaatttcctaccgaatttctcccccaccccctgcccacctgcctttgcttgtgttttttctctaacctaaccttttcatctataaactactttttagaaattttcttggctttgcttctcttttctgcccctccatctgttatgtgataagccttcagatcccaagaaaaagactttattattccaaaatgctacgcccttatcacattcttactttaaaaccccttcaacagccttaataaactttaatcacatacttttatgaacctggtcaaaatgtcagaatgttttaatatattcaacattgttaaactacaaatgataaaaatattcaaacaaccaggcctttgactttttttgtgattatcacatcctacttctaaacctccaagcttaaattattttccaactacaatctctaattcttccactttactccctagttgctcattcctactgattgtcatcttcctttcatcccagacttctatttcagttccccaagatcacctccccttgtggctctgcaggcttctctattcaatctagacctgttgtccggtatttcaacaacattctaataacattctagaatcctgtagtctgtgtttctaaagcataactctctctattcagtgccattgtattgctcaaaaatttttaatgctccacacattgcctaccttctcctctcacccttcatttagaagagacctcctctctgcgggcttgaggaacaattgttttgagcattgttgtggcactcatcacattatcctccctggactatgtctggatccttcactgcttggacccttccttggtcacaaaggtgcttaataagtgtatgctgagagataggggggttgtacagggattcctgaaggggtgtgtgtggtgtttttttatttgtttgtttgttttaataattagaatcttttacatccagataaggacaacaactgggatgtggaaaaaaaagtgtcttatagagagagaatctgacaatctagtgatattagaaaagtagttcgtcctgggttttatgcatttatatggttctgtttcagtagtgaaggtgtttattttgctgttacagtgcagcaattgttacattttagcaaaaatacactatatccttttacaatccagtgtcttcagatagatttctaatgtaattgaatattcactgaaccacatctttattgttttcactacttttctataacttgagaaaactgatagttcacccttaatgcctttcacctgatactttagcaaataaattatgcatagggagtgtaagtaaatcactgcaattccttatccattaccacacatatttatggatgaaaaaaattgatgcatagcttgccttgtctttttccttttaaacttgtggaaaattagtggctaaactgagaattaaggaaatcaaattcagatttttcaagattctctgattaatcaaacattgtcctttatatttggcaaaatagtcattaatgacataatttgaattttgtgacccattaaaatgttcttcggtcttctatattgaaaaaatggtatttgtgttacatctcactgtattcttttatgaaacattaggagtaggaaagcttttatgcttactgaatcccttatttaaaaaactatgttggtgacagtgaatgtctctcaaaataaagctgtgagtattttaaatggacagaaaactgttttctgctgggtttgcatgtgtttatagatgttgaagcaattagaaatgttttttgcatttaaaaatgactttctgtgttttcccaatataattactaagacatgttccctcataaaatcgatcattttcaaatcatgaaaataagaatatattttgacaattcattaatatagcagcttcatttatttggcagcagtatgatagaaagctggcgctgagctctgaatggagaagggcgcgtctcttccctggctacctgttaggattctcctttagaaccatcttttggcacttccaggtaaaagccagtttcatgagccaatgtgaattgcttttaagggtttttttatgttatggcagcattatttgtttttcttctaccttgatttttgagcttctgtcaatgtttcattattatgaggaaaaaaccattcacctggaaacattgtaaagatgagtaatctagcatctatgtaatctagcatctgttttttgctatgtcacacctgcatgcacctgagtctgtgttcatggagttgggcatgagtagtgtgttgtgtgaaggaggtgaaacattactgaggtgggtggcttaaggtagtatataccaagttatgtttcctaatttgaagataatcatgcaggaaaatttattataaggaagaggatgatatggtgcagtgaaaaaatggggaattaggaatcaaaagctttgagttcccactgcactgctgacttgctttctgatcctaacaagtttctaactcctccaagcctccattcatcaaatgatatacagaaatgctctttcagggggttgcaaggatctaattagaggctattgaagactctttgtacactgtaaaatgctattcagatattatttattttaataaacagtgattgctttatgtcaggctctttaacaaaaattcttacaattcagacctcctatcaacactgcaaagcaggcattattatcgccattagtcaataaggcaactggcatacagaaagtaactaagtaacttgctcacatgctacttttaagtgatgattcccaatttaagttccagctgcttttttgctatgttgtcgtgctgttaataaaggataaatggtagaggtttgaactttaacaacaacttggattatgcttctaaaaaaatggaagtggcgctctagactaggagtcaggaggttcagactgttactatatttttctattattttggggtaagttacttaaattaatttcattaaatatgtttaaaacacttggctatgtttctgctaaggtttacatgtaaaatgctttcttattttaatcattttcagaatttaaaaaatttccttcgaagggatcaaaagtattttatgaatctgttttaatatttttttttctttttttaaagtcattcctacactagccaagattacagtacccagggaaatgttgggaagatttctttagatcagattgatttggtaagtagaacattcttttaaacttagaactgtatcaatggagggaacatagattttcttaaatcaaagacttttgggtgaggagatagaatattatttcactgcttgctgattaattttaaagaaaatcccatgtcctacttagatgatttttaaaaaatcataggaaaatcatttaatcagaaaattatctgtacttttatgaaaacagaatttaatcaacgattccaaacaggaattcttttaaatagctaaatggagtttgtgtttacatttaaatactgtatacatttaataaaggggaaatggaaaacactaagtgtattagtttgttagggctgtcatgacaacagaaatttattttctcacagtctagaggcttgaaatccaagatcaaagggatagtaagtttgatttcttccagggcctttcttgtctcacagatggctgccttctccttgtgttctcctgtggttttcccactgcttgcatacatccctggtgtctcttctttttgtaaggacactgagtgtgtgagaccagggccccacccccatggcctcctttaatcttaatgagttctttaaaggccccatctctaaatatagtcacatttggagctactagaggtcaggacttgatatatgaatttcagggtgagaggacaattcatcgtctagtgtaggctacgagattaatagatagcttattttagcatcatttgactttgtggttccatagggtagcgtactttgccatacttgtagaatttctctttaatacataacagcatttgcactccatacacaaagggaaaataagccagccataaataatcttgggttagacgattaccaaattattcacaagaaattaaaaatacacagggattttaatgcttggaaacaagaactgtaataagactagtagagaaagaccgtgagtttggatcagaatgaataggtcatcttccatttgaaaaattataaaaaagtacttgcagttaatatgtctagaaataacaatagggttgcctactttacacagttgatttgttgatttgaaatttgttctcaaagatgtcccatcttttaatttttttattaaacacttatctctaacagtcccctttctcacttccactcatgtgatttgtgcttatataatgtgaatggttggaggttaattctgttcttagttctagctagatgtttccccattcacaagcaaatgtgaatttggttggatactgttggagttcatagaaatattaattcatttaatggatatgtattgagcccatcagttatgtagcagccattgtgctgtggatacagaagtgaggaaaacagaaaatgtccctgccttcatggaccttacatgagggagagggacaacataataaataataaatgagcaatataatgttaagtgctatgatgatgatcttgtcatgggtctgtgcctgagaccccgtggtgagtaatagagatgtatctttttttggactgcctcctaactctgtatctatattgtttgatcttcacaacagcatgtcatttgcatatcccttggtatttgcaactcttctccaaatgttttctttagttttttcttctaacaaatctggctttctcaatgctgtttcccctgtgggcctcttcaagtagagacaactttccccccgagttcgtatataggtatgcggtgagtgtctttcttgttccacatttctctgccttccattgttacagctccagctcctttaaagccctcgtgatcttattatatcatctgatacctcctttgttgctattccaccccctccccccacacctgtattcgttgatgatttgaacacctagctaatggttttgtgtactggcgctattcttgttattgttcttggcctctgcaagatccaagttgataatttatcccctatcctggacttatgattcttttgtttgcttgttttccatgataatttttctatctgtatatagccagacactatctttttaatttttattatttggactactgcccacacctcttaagtatccctcctgcttccattcttactctcatattgtcttttcactacgtaacagccagagttctctttgtttattgaatcacatcagtcttctggtcagaaccctctagtgggttttcatcatatgtagacttaaatccaaactcatgttgtggcctctgaagccatatgtgctcatcatttctattttatcttctgctccattccagctcactcacttgctctggtcacatggatcttattctctcttttagcacaccacatttattccttctcaggatcctcatttcactagaatccaacttactttgtcttacttgaaatgccatctcctcaaaaaggcttccctggccacccaaatggaagtacttctcccctaatcacacttgatttcatttctcttatttcatttccagtgttttggcatcagatgttatctttttaatgtctgtattcattgtccgtctcctcctattaaaaataagctcttcgaggacagggtttttgacttctttgttcactactggttccccagggctgtacacatagtcagtgttaaatagatacttgttgattgaatgaataagaagtaatcaaggaatgtgccaaaagaaatagaaattgagttgggtcttgaatgatgacttggctttggctacatggcatgtgcatgagaagggtgcaccaggcagggctagcagagtgagaaaaatgagaagctacagagcatgactgcgtggtcatcggatagtgaataatccagtggactggagccgaggactcattttggtgtagtaataatatactggactttcccgggctccctgtcacagtgcttctgtggtgctcaagttttgcccttgttggagccctcattttatcatttatttcatgtgtttaacttacatagtagtgaatatagtaattgtggtgtctttttccttaactgaattaaaggggacaattaggtcctagcttattttccagaacacttaataaataattgttctgttatgtataattgaaaagtagttattggccaggcacagtgggtcatgccatctgtaatcctagcactttgagaggccaaggtgggaggatcacctgaggtcaggagttcgagaccagcctggccaacatggtgaaaccctgtctctactacaaataccaaaatcagctgggcatgttggcaggcacctgtaatccctgctactcaggaggctgaagaaggagaatcgcatgaacctgggaggcagaggttatagtgagccgagatggcactgctgcactccagcctgggcaacagagtgagattccgtctcaaaaaaataaaaaaaagaagaaaaaaaagaaaagtagttaccagatattgaggaaaccttgcatgttcatactaaggatgttgaatattgattgtatggattagaacaatgtttagaaaaaaatcagatattaatatgaagcaacaaaaatggtctcatgaaaatgagctgaaaggctttctagttagttctaccaagggaggatataggtctgaatgaactagactggggatggaaaaattcagaagttgttactgtaaaagaatgaagagaaactagatggtcactagagggaacagcaaagtcaagcaaagtgagacctgctctttcttatagatgaagtgaacttgctaaggcatatgtgagggagtaagaatttaagtcttgggagaatatttaaggaagtcatagagaatgcaattgaaaccataagtgaaaaattaaagtaagaaatgatatttcatttttagcactaaggcactaactatactttgttccttttaacttggtttctttaacatatttatttgaattttccttatgagaagtttctcttatttttgtgttctgctttgtatttgagttatcttaaaagttcatctgctattcagcaattgtacttttatctcagggaaatgaaatcttatgttcacataaaaacctcttcaagaatgctcataatagcttcatttgaaatagcccaaactggaaacaacccaagtgttcttcaatgagtgaataaataaattatgatacattcataccatggaaaactagttagtaataaagaaatgagcttatatacaacttagatgaatcttgagggaattctgctgagtaaaaaatgacaatctcaaaacaatacatattatatgattctattatactcttgaaatgacaaaattatagagatggagaaccagatcagtggttgccaaagattagggagctgagggaggggagcagggtgcaaaagttagatgggggtggttataaaatcatgagagatccttgtggtgacagaactgttctgcatcttgactgtggtggtggatgtatgaacctacatgtgacaaaattgtataaaatttaatacggaagtaagtgcatgagtacaactgaggaaacctgaataagactagtggattgtatcaatgtcagtatcctgtttgtgataatctactgtagttgtacatgattttatctttgggggaatttggatatatgctatctctttgtattatttcttgtaactgtatgggagtctatagttaacttcaaagaaaaagtttaattaaattaaaaaacaggtaaaataaattttaatagtatgttatttaatccaaagtatctaaaatattatattaacttgtaaccaataaaaaatgttaataagaaacatcttatacagataagcgtcatctgtaaccacagtaataaagcagcactttcttatggtgtttgtttttttattccaattaaattgaattagcaaccataacaaatattacagggtacctgataagtcttccacttaacttaaaactctactgttttttcttgtagctttctaccaaatccttcccactttacatgcatcagttacataaagccttgcgggaaaatcaccatctttgtcatggaggccgaatgcagtatgtcctatttctgaagggcattggtttaactttggaacagacattgcagttctggaagcaagaatttatcaaaggaaagatggatccagacaaggtaattttgaaaaaaaaaatcagagtggtacctgatattttaatttggtctgaaaatgaaacggtctatttttttttaaaatatgctccctgcaatgtagttgaaaattctaaaaggataaatgtgttgacaattcagtttagataaaaagaaacttgcatattaatctaatacaaaagattgggaaaggaatgttttcctttgtaggtatactgccagtagtaattataagactgaaattgctttcagagttatatatctgtaggaatatatgtgtgtctatacatatgcacataatgttttgagcactgggagatatcatgaacaaataaaatgaaacaatttaaaatattttctattatgttatgcagaatcttttagaaacttttggttttttttttcgagacagggttgcccaggctgggctggagtgcaatggtgcaatcatggctcactgcagcctcgacctttgggctcaagtgatcctcccacttcatccttcccagtagctagggccacaggtggacaccattatgcctggctaatttttttctttttttaattttttgtagagatggagtctcactatgttgcccaggttggtctcaaactcttgggctcaagccgttctcctgccttggcatgctgaagggttgtgattacagctgtgagcctgagtcatcatacctagcctatagaacatttttagatggacaataattactataaacctgaacaattttttaaaaactctatctgcagtgcttatattcccaatcctatgccttatttctctttaatagtgccagctaataacattttacttggaaatatgatttcttgccccttctatgccatgacactgtggtatgaagaacattttttactgtttatttcttgatttgctgcctcctaaaagtaaattatagaagaaagaatatttaccaggtacattttatagtactttattatgttttatgttagtttgcaagcattgccaaaataaaatgccacagactggttggcttaaaaaagagaagtttatttcctcacacttctggaggctggaagtccaagatccaagtattggcagatttggtttctcctgaggcctgtctcctcggcttacaggtggccttcttcttgctttgtgctcacatggccttttctctgtgcatgtgcatccctggtgtttcttccttttcttataaatacactagtcttacaggattagggccccacactcatctgacctcatttaaccttaattatctctttagaggtcctatctccaattacagttggatttggagttaggggttcaacaaatgacttttaggagatcacaattcagctcgtatctgtagctatatactttattaaaaagcttagatttttaaaaataacattataaaaagctgttacagttttttcagatttgttttaaaaactgtcttcatcgacaattatccatagaatcttaatgaagtcatttaataggattttctttgagcagttttggataatgttttttatatttcttttaaaggtaatttattctaattatagaaaatatgaaaaatacagaaaaattcacctgttaccctccaatttgaaataattactgtcaacattgtagccttttactctagtctacagaactaaacaccgctgattttcaccattctaaaaattgtcattatattatgattatttttccatatttttgaccaatctttgaaaatatcttaatgagttacataatatatcctttgaaagtgatgtaatttgtttaatcattctcctattgttggacatttggttgtgtctaatttgactctgttatatatgttactaatttaaataacagagtcaaatagctaatatcctgtggacatagataattgattatagttttgattatattctgtgtgtgtgtgtgtgtgtgtgtgtgtgtgtgtatgcattcaccaggaaataaaattataagaaactacacacagctgggaaggttggctcatgcctataatcctagcactttgggagaccgaggcaggtgggtcgcctgaggtcaggagttcaagaccagcctggccaacatggtgaaataccgtctctactaaaactacaaaaattaactgggcgtggtggcaggtgcctgtaatcccagctactggggtggctgagtcaggagaatcacttgaacctgggaggtggaggttgcagtgagctgagatcgcaccactgcactccagcctgagtgacagagcgagactccatctcaagaaaaaaaaaaaaaggaaactacacacaattttaaagttttaatgcatgctgtgaaatgactgttcagaaaggttttaaattagaccctcttcaagcgatgtgagaattttgctctgccattgacatcattatgtattattaatttaaaactgtttttgatctttttattaggaattcgatgtcttaagtaggtagatgtattagggttctccacagaaatggaactgtgtgtgtgtctgtctttctgtcacttacacacacatgcacacggacatacacacactctctcacacacacacacagagcgagagagagagagagagttggaggttatggaagttgacaagtctcaagatccgcagttggcaagttgaagacccgggagagccaatgttgtagttctagtctgaatccaaaagcctgaaaaccagaagaatgatagtgtacaagttgatgcttgaaatacacaggtgtgaactgcatgggtccacttacatgtggatttttttcaataagtatattggaaaattttctggggatatgcaacaatttgaaaaaatttgcagatgaaccacatagcctagaaatatcaaaaaaaggaagaaaaaattaagtatatatgaatgtataaaatatatactagtcttatttactaacatgagatatacagaaatctattgcaaaaagttaaaatttatcaaaacacatgcacacaaatgtacagaccatacatggtgctattcccagtagagagaaatgtaaacaaatgtaaagatgcagtattataacctacataaaattaactgtagcacattctgtgctactatagtaatttaatagccccaccctgttgctattgtggtgagcctataagtgttgcaagtatctgcttaaaacgctctgtgatgctaatcatctcagcgtaagcagtttgcacagtaaattgtatattacagtaaagtgatctctcacagttctcgggtatttttcatcgtgttcagtgcaatatcataaaccttgaataacaccatcgggctcataggaagtgtcactagcaatgctggaaatgcttccccaaaccagagaaaagtaatgatattacaagaaaaagttgaattgcttgatatgtaatatagattgaagtctccagctaaggttgactgccatgtcagacagatggttcatcttgtaaatagataatgtaaacttacggtatcgatcaatgtagtacagtactgtaaatgtattttcttatgactttctttctctttttgtatttttagttgagacggggtttcaccattttggctaggctggtcttgaactcctgacctcaggtgggctgcctgcctcagcctcccaaagtgctgggattataggtgtgagccactgtgcctggcctattatgactttgttaatttttttttctccaatttactttattgtgaggttacagtgaatatatataatacagtgaatatatgtaatattcaaaatatgtgttaatcagctgtttatgttttcggtaaggcttatggtcaacagtagggttttagttgttaagtatttggggaataaaaagttatacatggatttttaactgtatggggtgaggggtggaggttgttgcctataatctctgcattgttcaagggtcagctttagttccagctcaaatgccaacagcttcgagacccaggaagagtcaatgtttcagtttaaaaaatgaggtcccagtttaaggaagtcagacagaaggaaattccctcttactcacaggaggtcaggctttttgttctgtttaggctttcaactgactggttgagaattattcacattaggtagggcaatctgctttactttaactaccaattcaaatgttaatcatatccagaaacaccccctcagacacacccactgtaatgtttgaccaaatgtctgggcatctcatggcccagtcaagagctgggttgttgttgttttttttttttttttttttgagacagagtctcgctctgtcacccaggctggagtgcagtggtgcagtcttagctcactgcaacctctgcctcccagggttcaagcaattctcctgcctcagcctcccaagtagctgggattacaggcaagcatcaccatgctcagctaattttgtatttctagtagagacggggtttcgccatgttgctcaggctagtctcgaactcctgacctcaggtgatccacccgccttggcttgccaaagtgctgggattacaagcgtgagctactgccaccatgcccggctggcgagttgtgttgttttgaagtgaaaagagagaagttgagctagcattttagcttggtttgtgctgtgggaagaaaaaggaaagtagagagggaaaaccagctgcaccagcctatgtggacacttaccctgagtactaagtctttggcttggacacttgttcattgacctgacttcttttatgtacatctggaatagcctgtggagcaatatcatcagtagtcttttttttaacttgtatgtttaaatttttttattatggaatttttattttgcaatgcaaacttttttcaaaaattcttataaaagaaaataaataattttttagttttctagataacatagtctatatttttattagcttattaattacagcaaatgttattttgactaaaggattataagacacatttctgactttctatgactatttagtgttctgttgttacatagtccatattgtaaatgttcatgtttttctcaactatatcatttaaatgttttttcaatgacatgtaataaactaaggcatactaaattacaatattctctaattgaaccattgtatctatttgttaagtgatacatacaattaaaaatattcttaagaggtataaaaattgttggcttaaaatactgcttataggatattttttaggatgattatagaagatgttaaacattttttatagtgctaatgaaaggacttgggtgttgaacccagctcgaatgatttgaaataacagcttctgtttggacagcttatgtcctaacagtgtaagaaaaatgatgtggtaacagtcaatttcaactggaatttttctgtactattgtttcccaaatgatcataatgtctgatttctttctcttaatatttgtgtcctcatggtgacttatttgagatacattgctatgtgagtctgagcaaatattttgggtacttagccagtacttttgagttagcagagactggtataatatctccagcacttttgagctctaactctgcagctacaactacctttcctagatatactgcctggaaccaaatatttctttaccctaacttctagcgcagctctgttcttgaattgactgcctgatcggtatctgtctcttcctcccatctttacttacttgtgcttgttgcaggcattttttttttaacactttgcttttaaaactaatgttatacttaatgttggaggggaatgtgttgtctgtattctgaaataatttacacctgtattagtgttgtttgtaactgtcatccaaagtataaatattaaagtattgtgtctctagataccttttattaaggttaagcagtttttgtgttataatgcacataatttctgttataaacatttttgagtagtaataatggattgtggaagcagcttaaagttctgatgctcactgttatttttttattaggaatttgatgttgtaagagttaaagaaggaggaaagaaacacgaaaagcagctcaacagtcaaagacaggtttattttggagaataaacctgagtggggcttctggccgagtttggtcagtaatgctgtctcttacagactgagagtatttattggtgagagagcttggaatgtttctgtgtgggggagaagtttatggcagggttggaatgtctctggttggagaggagagtatgttggggctgacatctctccagctggaggggaggatatctcgggactggcatgtctctggtcagggaggggtttggcgtgtttctggtcacagatgttatttgtggtttatggtcatgctgactttagccattaagctgatgccctttggatttaggcagtttttgatcaacgtaaattttaaaatgacagtgctcgtccaagatggcaatgctcctgctctgtcagatgtattaagtcagtcctatatatgtaaaaatcagccatctgtctataaaatgcttattcagagttactagtttggattatttttcttgccttttgaaactattttccggctagcatatatattccaataaatgatattggttatttgctaccagattatgttcttttaattttgggtgcttatgactaccttatatttattgcttatttattcatttattatctgtatcctacaattagaatgtaaactatataaaagcaggtatcttgtctttcttgttgactgctgcatgttcaggcacctagaacagtgcctgactcgtagcaggcactcaataaatgtttattgaataaactaatacatggaaatttccatattatttacatagaaataaattttcatacatgttcatagatattatttatttatattttgctgaatacaaggtaaattctaccaaatctttaaagtttggctttcgatatgagaaaaaataatctttatctgttttggttctttttagatagagctgtttctaacaagttatagaatttaagtcattttagttgcttttttatttctaagagcagtagatctcagcatcagcatcatttgggaatttgttagaaatatagattcccagaatcaaatttgttgtcgtccatgtatttttctaaatcaaaatatggattggtagaatatacaaatatacaaatatttaacatagtatcatattacgattcttataaaaagtacagagaaatatatttgtgtgtatatgtatatacatagatacatacatatgtacatattccatctacttggcatagatcattcagccgatttttattgcgtgtttatcatgaacatgtaccattctgaacatactgaaataaaagaaacagcccttatttatgaagactttccaagaccttattttatttattgtaattatttttgagatggagtttcactcttgttgcccaggctggagtgcagtggcgtgatctcagctcaccacaacctccacctcctgggttcaagctattctcctgcctcagcctcccaagtagctgggattacaggcatgtgccaccaggcccggctaattttttttgtatttttagtagaggtggggtttcttcatgttgatcaggctggtcttgaactcccgacctcaggtgatctgcccacctcagcctcctaaaatgctgggattacatgcgtgagccaccatgcctggcccctccaagaccttatttatgagagtcttccaagagatttatttggaaaaaccagataaatacaaatgtacagacagagaaagaagggaatttcatgttaaagggacaacattttaaaggaccttaaagtgcagtccatcctgtaggtggtaggaacctgaactgtaccagtgtaattgtggcaagaggggagtctggagacatagattttttagcctaattactaaagatagattgaattagtaggccagtaggaactggtcttgttgggtaggtaggtgccaaccaggatcctgtcagccaggatagggtcaactggtaactggaatttagtcaaatatgtgtagtttcacaactttgaatatttactaaaataatataatgaatgttggatgctatgcaggtttactgaaaagcggaaaatagtatgagtaaagtttccacttggttcaaattaatttcgcctaacttcggatttctgattatataggccaacattgatttttaagaaactattttgctttagagcaaatttaaaaattttaatctacttggttatagtttaattgagaatgaaggatttggaaaacagttccaaaacacgttggtaaaaaggaaagtattattaaggtgatgtggagtaagaaagttattagagtggatcgtgttagagaccaatcttgaattaagaattggagaaagtgaatgacatggattagttgagaaagaactgagagcaagaatacacagtgaacaaggaatgaggggaaaggacacaaaacatcgttaactcttccattattttctttatttttataattattttaataaaataattttacagtaataattcttccatttattactcattcacttaggctttttattacctgtttttgggattgttgtggttttgactgttgtgatgtaaaattctccatttccagactttttgtaatttaccttctcagtatatttgaatactgttttatttagatgcatattatacttgaggatagagattttagtattaaaacatcaaccatttctaagagaacattccattgttgtatgatcttatagcaaaccaattgcttttcacagtataccttactccaaaaaaacattggtttcataatgtagggtttttattcttaaattgttgaatatgaatattgatatatgtaaaatgttaaaataaagctctttgagttaacccttgtcagtgaaggatggagaaatttgaaaattgcacttaggttgctgaatcagattttttggatttgtgaatgattcacaagaagtatttaaagttttgaacgtcttattccttaaataatttcctgtatttctgaaataaatgcacctatgctttatacagataaaatttaattattcacagtaaagtttttcatgtttttcttagttgtaattataatttacaagcctgtctacctgaaaaaagcatcaccctgggtgcaagagatataaaatcaaacctttatttatttattttttattttattttaaaaatttcaacttttattttagatatgggggtacatgtgcaggtttgttacctgagtatattttgtgctgtgacgtcatctcccaggtagtgagcatagtacccaataggtagtttttcagtccatcctcccttctgcctctaatagtcctccgtgtctattggtcctatctctatgtctgtgggtgctcaatgtttagctcccacttatacgtcagagcatgcacaaacctctatttaaagtatgaataccatgaaaatattcttttacttggcacttggatattaaatcacttcggcgactagctttgttaagtattacattgaactggataattcttctaataaattcaaagcatgtgtcctgtcagatattgctcatagtgttgttattctgaattgctttaagctggttttattggatattaggtacaacattgataatgcacattttctgtagctgtggtttctgtccttgatgacagcatgcttaaggtctattatatgttgttataattgggtcaaggaacatttagcactgtttaaaaagcttatcttttcttccagaatctagcttgcgtcaagacttagaaccaacttgtgttgttaaaaattgactactgaaggattaaatatttggctggtgggatgtaagtatatgaaacatttattgttaggattttttatttcagggaccagtagatctcagcatcagcatcatttgggaatttgttagaaatgtggagtctcagaatcaagttctggggtcagggcccacaatctgtggtttaacaaatcatccagatgaaattgatgcacactaaagattcagaaccactgttttaactactaccctgtcatagtccattttctagtgcttatcacagaatatctgaaagtgggtaatttataaagaagagaaatttatttcttctagttatgactgagaagtcccaggtcatggggctgcatctgttgagagcctccttacttgtggggactctctgaggagtgccaaagttagagcaggagtgccaaaagttagagcaggaaccagatttcctggtcttagcatacaagaaaatggaggcgatgggaatagaatgtgtgtttctaaagtttaagaagtcaggaagaaaagaaatagagcatactaggtatagagggtgactgtgccaagcaaggttttcaagttggggtgggcaggagcagtaaaactcatggaaatggaggatgtgctgagaatacttgaggaaacaaggcctgaggagatggaaagagaattttaaacatttatttattatgtgattattataatatgaacctctgtttcctatgtgatgttccctgagtgtagaatttgtttctttcttaccgtgatatacccagcacttgagatggtactgacagactgtatatgctcagtaaaatttgttgaataactgaaagaattgcattgggagtttagtttatctcacacctgatggatatatgaaaaattatgaattggtaaaggagtgtttaaaagtagaaagaagagctgtgggagctcacatccactgctcatctttccaataaagtaggcaggggaatcgcttaccagaaggatttggtgtatttagggcttaaagaaagttgaagagtctagaataataccttccataagtgtgctaagtcattaactaattaaaaaaaaaagattgctaagctacagaatggttacagtttgagttcctagcatatgctaggcactataactaatattctacatacacaattttatggaatccttaaaacaatcttaggagataagtattatttatgttgagtttactaatgaaaaaacagtactaggctataaatttgtaactggctaagccagcactattatgttgctttctctagcagtgtcttatggccttagagcaaaagcagagatggcataattttttattcaggtttaggggttagcaaagcaggcatgctgctttaaattcttcctatgttttctgtttaatttaatctcacaccaccaccatgaggtaaatattatcttcgtttgatggagagtttaatgtgttttcctcaggcagcaaaggtggtacatgatcaaacctgggttagacccaggtctattttattccaaaccctgaacttcccccagtactcgcagaaggaagactagacttagtgtttaggttgacactgataatgataactatgtaaactttagagaacacaattaacaatagagatttttcagttcttgaggacaatagtaatgtctgctaaaatattgcaaagaattaagtatatatgtgaaatactatgtaatctataatgtactaaagaaatattgaataattttaaaatgttgataaaggggttattctatatcattcacattttctcaatatatttgtaaacctgttaacttctagacacaaatattagttttctaattgcctatgtcttggtttttctttcaaagaaaagctagttttgtttgaatgttcatgttagtgagatcctaggaaagtaatttgaatgtaatgaaaaaaatagtttcttatggctcacgcctgtaatcccagcactttgggaggccgaggcgggcagatgacctgaggtcgggagtttgagaccagcctgaccaacatggagaaaccctgtctctactaaaaagacaaaattagctaggtatggtggtacatacctgtaatcccagctactcgggaggctgaggcaggagaattgcttgaacccaggaggcggaggttgtggtgagctgagatctcgccgttgcactccagcctgggcaacaagagcgaaactccatgtcccccctaaaccaccctcaaaagaaagtttcttgcaaaaatagtctaatctttcttattatttttgggcagcaattttaaaggtacccttaacagctaccaagtcatctaaaacatatttttgaagctttattgcagtgaaatttgttatattctctcttataaatagtttggtgtataataaagatatgtgtatgttaagggtttaattcttctcttgatgctttccatagcatgtggaataccaattctagattatacagtataagaattaatatttaaacattgacttgaacaggttgggcttgctttcatgaattgtcaggaggctagctagtcaaaattcaaattaaattatgtattgggttaagtctatcattagaataaaacaggtgttattatccttctcctaacactattctggcaaaaattagctttagtaaatttaattgcccttgatgttgtactccaaatactttttaattcttaaattatggaaataagataaaaaatagaagacttcaactctgtcattcatttataaatgtcattttgccagtgataccttatggattatgctgatatattaaaatgagattaaaaaaataaaatgacattttattcaacattttaaaaggtgggtcaaatttttgttgctaatatatgtggtacttttaggggaaaatgacaataaaatatgtatcttcttaaaaagatgccagtttaagatatcaagagtatgttttaattggccatgtctctggacaaattgggtacgtataagctccaaaatgggtcagacttctgatactgaaggatttttctttggaagatttattaatattaggaatctcaggggcttgaagtgtggggaaagtatactcttggctttctttaacaacctgttgtgtgtttgtcacccatcttttgcctgtaaatctttgttgaatttattattttgtttttacttaaaaaaattactttgaaccatctttccagtttgtttacttctatgtaaagtaggattttattttatttaaaaaataaccaaacagttattttgctcctgcctgtgcgcattactctttatagtaagagagtatataagtttaaactgttgtggggacccagagaatggttgtgctttaatagtgcgattgttgttgttctatgcagctcagtcagaaaagcaggaatcctaatcaggaaagggctagagggatgtttactcaaggggaaatctagacggttactgttctgtattgataagaatgtcacctgttaagtgaagtcagccttttaattgagaataagttcagagaaagagacacaaaaactcacatttaaaaaatttgaatagtaaggatgatactgattaggcaccctaagaagtagattgcttttcgactttgatcccagaataagcttgtcattttcttttgtactatctcggacataacctgccttttcctaggggactgtttaaagagtgtattttgttcatccattcaacaaacattgagtgtctactatgtcccaggcagtcttctagctactagaggtatagcagcagtgaacaatatagaaaaaaaaattaaaactctggagcttacattctggttgaggagagacagtaaacaagtaagtgaattattgatatattacttggtgattactgctatgaaaaaattttttcatgaagaagataaggaatgctgtttagtgcctggatgtggttttaaatagggtggtcatggaaggcttaaacaaaaacatgatgttttgccacaacgtaagttttatgtaagaactctaggcttggcatttttcttttcatatcttagtgggatatgaatagcaggtctgagtgttcaccattttacaatgaagaaactcgaggcaaagagaactgtccaagtgtactcagaattaacagacactggatcttaaaacctttcgatatgatttcagtctgtggaggtttgagctgtaatgcagccagatttagctaaaaagtcagtgggttcggggaagaccagcaggaggcagtggagcaccagcacaagctgaggccaactcccattgttgaggcttgggcaaatgtagcttaagtcaggtgagaagcactggcttggtggcctgggcttacatgaggcctacactaagctcactgagtctctgttctcagtgaggaaggtggtttcagacccttcattttggaggggctgtcatttaaaacaaggtaccaggctctgtctgtgactctaggactgataaggcagatttccttgctctcaagtctttgatccctgtagcctacctactaggattgagtaaagcaacactgtcttaatcatgcctaggctcaaggatcttgtgatttagtcaagttcttagagaggggaaaaggattttctactaaaatctcaaaagaattcctatattttaatcccccactggaaagatacaccagagggaaatgaatgatgtctacaataaggtgtgtgagtcttgggcacaattaatctttttacctactatatgctttagtttgtctccacatctttggacctcaaggccttttatttcaacctctcatttccttttcctttgcattggttgagacattttttaagctctccagttgcattcctgtatgccatccttaccctttgaattttcatgtaagcctcaaaaaaacaaatatttctacatagtttctctccacctatcttttctgccccttcctttggcagtttttagacttttttttgtacgaagaaaccccttgttttccgtaggctttcaaaacaacactgtgatgaacattcatctcagattttctccactgtaatatttaaaaattgcaaataaattgtattttattctactagatttagacagtgtactcaaaaacaaaatgtttgtcagaatgagtaaatatgaaacaataccattgtcactagcttaaatagtggttaagtgatattgttcagtaaatccatatgtaagaataaagtcagaatggtaaaagtttgacatttcacaggaaatgtgtggattaaagggatttttatttgtttaaatatagtcgctttgtaatttagatagaataatactgttaaaccaatttgaagataaggtgtgctttctatgttgatgtttttaggttatattataatttgatgtctctttaccaacaaaggaaagatatatatatatagattaattctcttggatatgagttttatcacaataatgcttttatttctaccgttagttttaaaaatacttaaaattgcctcttgaaaaatctatatttaaaaaaacatgaatccaggatatagtcattttaattagtatatttgaatataatgttcactaatgagaatgatctcaaggtaattcaagaagagatcatgaagtctttgtttttctaggaaatttccaattttttctgtctttaaaggtggacttatttttaaaggtggactcttttttgccaacattgcatgcactttcgttgcccttcttgtttcctgttatgcttgctgtaactcactgtgtaaaccttgaggctccattacttgctttgaggtttggtatcctattctttagtgatatggcaactgcagaaacactgcagtgtggtctttagagtttcaagggtgtcatagtacttaaggctactttttgtcctccttttttgcttccttattccttgcaaagctttgccttggccacatgtgagatcaagcagtatgtttccacagtttctaaattcttactctaaggaattagggacaagatgatttccccaaatcatccctagcccatgtatgggccttctaggaatagtaccataaaaatctgtctttattaataggtcctttctgacaaatcaacacttaaacattattttaacacaattttatgatgatgattatctgctgcagttttatgtattttaatcattaacttattgattgtgccttgaggcctcttacataaaggatgcaatttgaataatgccttggtaaaaccatttaatctctgtttacaactatattatgtttcatcccaaacagtaatgatgactcctttctatggataacatggcacatattgtttacatgtaaatgttgttttaaaagctatattttgttagacttagattttcacattcaagatcattcctaaagctttatgtgattttttaaaagataattttaatctacctatagtgtgtataaatttattacctagagaaaaggaagaaattatactgtctgataggggagagaattctgaataattaaggggcaactagttggaattaattttagtacactagggatgaactagatttagtttaagcctctgttgataagagctctagaatcctttctgtttatcacagaaggcccagccctgtgttaatcctttcctgagcaccttagccagcagtgactaacacctctttcaatcttcactaaattttaagtgtctaaatagcagggattctatcttaaagtttttatattctccccacccatctcttgcataggaaagaatgctctgcacctagtcttttcttaatatgtattcgttggccgaaaatggacctaagtgtgttaagccattagttttctctttgaaaaattgaaggatatgctacttcatggttttttccttcatatttaaatcttgctgttgtcgtaaagacagacttttcatttaaaaagtataattgctaagtaatgtgttttcgttctttcagggaacccttccagccagatcatttgcttttctgactgttgagtatagataggcttgtccttagagaaagcagactgtgagtgccacagtgaatgccttgtattattttctctttacaaagataaacgaaagttctaaaagagcacattgtctgctttatttgtagggaagaatgtgtatcaaaaggggatataatattttgttgatagagacaaatggactaaaaataatgttatttttcttagaaacatttaacattttaagtggctttttgagaagatggctgatttaaagtaaacttgctatcctttggcatggttgagccatttaaaataatttgttagagtggggaatgctaacctttattaagtcctgcagtatgtctggcgctttgtgtaaatattgtatctatttatttatttgagacagagtcttgctctgtcacccaggctggagtgcagtgacatgatcttggcccactgcaagctccacctcccagctatgagcgattctcctgcttcagcctcccaagtacctgggactatagttgtgcaccaccacgtctggctaatttttgtatttttagtagagacagagttttactatgttggccaggcttgtctggaactcctgacctcaagtgatccacccgcctcggcctcccaaagtgctgggattataggtgtgagccaccgtgcctggcctactttgtataaatattcttatttaagcttagaaattcaccatataaaaataggtataattacctggattttgcaaagaaacaccctgaagatcagtgagtttactgctaggtagaagctccgggattcacatgatttttctgttcattggatgggccataccacaaacactagataagctttatgacattgtcttcttcctttagaaaaatgaaaaataaaaacaaaatattgaaaggaacagagaactagacattgctgaacacctggctaaactaattattctacttgagcactaactttagctacgggggatagaaaaagtccgtgattctcatttttggaaagaaatataatttttttggacaagaagagcttttattttcatatttattaaactctgtctgtatgctaatgttttaaggactgtcagtaatcaggaacacaatgccatcattcacaattgccataataagaataacatacttaggaatacagctaacaagagaggggaatgagctctacaatgagaattagaaaatactgctcaaagaaatcagagatgacacaaacaaatggaaaaacatctgatactcacagataggaaaaatcaatatcattaaaatggccattctgcccaaagtaatttatagattcaatgctattcctatccaactaccaatgacattcttcacagaactagaaaaactattttaaaattcgtatggaaccaaaaaggccttagtagccaaagcaatcctaagcaaaaagaacaaagctggaggcatcatgttatctgacttcaaactatactacagggctacagtaaccaaaacaacatggtactggtacaaaaacagacatagaccaatggaacagaataggaagcccagaaataaggccgcacacctacgacaatctgatcttcaacaacgccgacaaaagcaatggggaaaggactgcctattcaacaagtagtgctgggataactgactagccatatgtagaagattgaaactggaccctttccttacaccatataaaaaaatcaactcaagatggattaaagacttaaatgttaaacccaaaatgctacaaaccctggaagacaacctagacagtaccatgctggacattagaaatggacaaagatttcatgacaaagataccagaagcaattgcaacaaaagcaaatattggcaaatgggatctaattaaacttaagagcttcttcacagcaaaagaaactatcaacagagtaaacagacaacctaccaaatgggagaaaatatttgccaactgtgcatctgacaaaggtctaatatccagcatctataaggaacttaaatttaaaagaaaaacaaaaaaaagtccattaaaaagtaggctaaggacatgaacagatacttttctaaagaagacatacatgtggccaacaagcataggagaaaaagcttagtatcactgatcattagagaaatgcaaatcaaaaccacagtgagataccatctcataccagtcagaatggctattattaaaaagtcaaaaaataatagatgctggtgaggttgtggagaaaagggaacacatacactgttggtgggagtgtaaattagttcaaccattgtggaaagcagtatggcaattcctcaaagagctaaatacagaactaccattcgacccagcaatgctattaccgagtataagaggaatataaatcattctaccataaagacatatgcacgcgaatgttcattgcagcactattcacaatagcaaagacatggaatcaccctaagtgtccatcggtgacagattgggtaaagacaatgtggtacacatataccatggaatactcttcagccataaaaaagaacaagatcatgtcttttgcaggaacatggatggagctggaggccattatccttagcaaactaatgcgggaacagaaaatcaaatgctgcacattctcatttataagtgggagttaaatgatgagaactcatgagcatagagaagggaacaacagacactggagcttccttgagggtggagggtgggaggaaggagaggagcagaaaaaaataactattgggtactaagcttagtacgtgggtgatgaaatatctatacaccaaactgctatgatgtgagtttacctatataacaaacctgcacatatcccccaaacttaaaagttaaaaaaaaaaaaagaaaaagatatgacttttgacctcagggaacatagtctatactagactgttataacttgtattttaatataactattgaattgccttgcaaataataataacctctttggagacagataccacattttgttaggtttaaattcaagtaagtattggatatttagaaatatttcacaaaacttaataaataaatagacattagtctcctgagagggcagttctcttgttttggaaggcactgtggtgtggcggggagaatgtagactttggaatcaaaccagagcccagacctatttgccagttatttgccatgtgactttggttaagtcagcctctctggacttagttttctcatctttcaaataaggataatgatgggattgagatgaagattacatatgataacaacccttagtattgtgcttattagcacagtgtctgatacatagcaaatgatcaataaaatgccctcccctaagttcttatttaatatgatgttgaaagtagtaagcatagtaggaggacaagctcaagagtaagatatatctacctaggagactcagagagggcttcatggacaaattgatatttgaattgaaccctgaaggatggtacgatttggacatacagaattgggatgcatgaatattttatgatccatgaagtattcatataaaggttgttggtaacataataaaggaccttttaaaccatggtttggctaaacacatagaaccattactcaagtggagagtcttacactgaacctttgtaaaagctgagagcatgttattaagtttcagttaaagtattcctgctggatgctgagaaattacaggttggttttattgctgtcttctgatctttatctttcttaatatatatatagaagttagaaaatatatatggtggttccttgatacacgtgtttttatttcttttaaaatgtcagatgtccaaagcaagttggttgagggtgctgagctcttttcaggggttcaattttctaatcaatgccaagatgctaacttttaggtagtcattaatgagatacattttggggctgggcacggtggctcacacctataatctcagcgctatgggtggccaaggtgggaagatcacttgagcccaggagctcaagaccagcctaggcaacacagcaagactccgtctctccaaaaaaataaaaaaattagctgggtgtggtgatacacacctgtagtctcagctatttgggaggctgagatgggattgagcccaggagttcaaggttacagtgagccatgagcatgccacttcactctagcctgggagatagagtgacaccctgcatcttaaagaaaaaaaaaaaaaagttttgggctttgaggtgatacaaagatataagattagtgcctctcaaactttttatgtttgtcatacattttctgaatatttgaatttttggtagcatgcttaaagtgtctaagttgaatccatggaagttattatggcagaaatcacttgggtcacccttcagcactgtgtcatcatccaagcagaactgttgactgccctgacttcagtatttacctattctagtgaatttttgcagtctttttttggctttaccttgtacttcttatctgcagctagttatgcctttctcaaaattgtatctaagggcctactcaggtcaagattccatctgactgatttcacaataaccatctttcctcattttcagcaaagataaatttacttgctgatttaaaataattgaagaattggtttagaatagtacataggatacttgacgggatagatcctagacaacatagatgtaggtatttaacatcgctaaggtggtactggcatacctagaagatattgcaggttttgctccagaccaccacaataaaatttaaataaaggaagtcacacaatttgctttcccagtgcatataaaactcaaatgtatactacactgcagtctattaagtgtgcattatatctagaaaaacaatatagacacctttatttaaaaatacattttttgttactaaaaatggtaatgatcatttgagcctttggtgagttgtaatctttttgctggtggagggtcttgccttgatgttgatggctgctgactgatcaaggtggtagttgctgaagattggagtggctcttacaatttcttaaaataagacagccatgaagtttgctgcattgattgacttttcctttcataaaagatttctttgtggcatgcagtgctgtttgatagcattttacctgtaacagaacttctttcagtattgcagtctatcctctcaaccctgatgctgtttgtaagttaagtgtatgtaataatctaaatcttttgttgtcatttcaacagtgttcacagcatcttcaccaggaatagtttccatcaggaatagaaaccaccttctttgctcatccatgagaagcaactctttatccactaaaaagttttatcatgatgttgcagcagtcagctcatctttaggctccacttctaattctagttctcttgatatttccactgcatctgcagtgacttcctttcctgaagtcttgaacccctcaaagtcatccgtgaaggttggaaatcaacttattccaaactcctgttaatgttgatattttgatctcttcccaagagtcacaaatattcttaatgacatttagaatggtgaattctttccaggttttccatttactttacctagatccatcagaggaatcacaatctatggcaatgatatcctaattaaatatatttttaaaataataagacttgaaagtcaatattattccttgatccatgggcagcagaatggatgttgtgttaacaagcatgaaaacattaatctcatcatacatctccatcaaagcacttgggtgactaggtgcattgtcatgaagcagtaatattttgtaaggaatccttttatctgagcaccaagtctcaatagtggacttaactgttcagtaaactctgctataaacagatatgctgttacccatattttgttgttccatttagaggccacaggcagagtagatttagcataattcgtaagggccctaggattttcagaatgctaaattgtcttttactttaagctacaagttgctatagcccctaacaagaaagttaggggctaatttgaagccaggcattgacttctcctttctagctatgaaagtcctagatgacatcttcttccaatataaggctgttttattcacattgaaaatgtgttgtttagtatagccacctttgtcatcttagctagttcttctggataacttgctgcagcttctccatcagcacttgccgcttcaccttgtacttttatatcatggagatagcttctttccttaaacctcataaacccacctgtgctagcatcaaagtttttttttttttttttttttttggtggagatggagtcccgctctgttgcccaggctggagtgcagtggcgtgatctgggctcactggaacctctgcctcctgggtgcaaacgattctcctgcctcagcctcctgagtagctgtgactacaggtgcatgccgccacgcccggctgattttttgtattttagtagagatggggtttcaccgttgttgcccaggctggtctcaaactcctgagctcaggcaatctgccctcttcggcctcccaaagtgctaggattacaggcgtgagccactctgcccagccaattgcttcaaacttttcttctatagttccctcacctctctcagccttcacagaattgaagagagttatagccttcctctggattgggctttcacttaggggaatgttgtggctggtttaatcttccatctagactactcaatctttctccacatcagcactaagcctgtattgcttttttatcattcacatattcactggagtatcacttttgatttccttgaaaaacttttttttgcattcacagcttggctgtttggcacaagaagcttagctttcggcctatctcacttaactttctcaaagaggctagctgtcagcccatctttgctttgtacatggcttcctcactagcctaataatttctaactttttacttaaagtgagagatgtgcgagtcttttttacacttggtcagagtccttattaattggcctgatttcagtatttttgtgtttctgggaatagagaggcctgaggagagggagagagacagggttatggccagttggtggagcagtcagaagacacacaacatttatcaactaagtttgctgtgttaggtgggtgtgtttgtgacaccccaaaacaattccattagtaacatcaaagattactaatcccagatcaccaaaacagacataataataaaatatatataatgagatacaataatgaaaaagtttgaaaaattaagagaattaccaaaatgtgacacacagacacgaagtgagcatatcctgttggaaaaatggcatggatagacatgctcgatgcagggttccacaaaccttcaatatgtaaaaaatgcactatctatgaagcacaatgaaatgggcacaataagatgaggaatttgggtattatattcttcttagatagtttagcactccaggaaacactttagttctttatatttacactcaggtgatctcatccttttttatggcttcacatagatctatatgccaataactcctaagggcatattttcagcctaaccacctccctgagctctagacccagatatccaagtgcctacttatgatctatagatgatctatgttctagattatacaaacatcataatacttaggaggtatctcagacttaaagtgcttaaaactaagctgttggtataccattctgccccaaaccaactcctcctatcgtctttccaatctcagataatggcagtctcattgttttagttgctcaggttaaaaaccttgatgtatatagtcttttatttatttatttttattattatactttaagttttagggtacatgtgcacattgtgcaggttagttacatatgtatacatgtgccatgctgttgcgctgcacccactcactcatcatctagcattaggtatatctcccaatgctatccctcccccttccccccaccccacaacagtccccagagtgtgatgttccccttcctgtgtccatgtgatctcattgttcagttcccacctatgagtgagaatatgcggtgtttggttttttgttcttgtgatagttgactgagaatgatgatttccaatttcatccatgtccctacaaaggacatgaactcatcatttttgatggctgcatagtattccatggtgtatatgtgccacattttcttaatccagtctatccttgttggacatttgggttggttccaagtctttgctattgtgaataatgccgcaataaacatacgtgtgcatgtgtctttatagcagcatgatttatagtcctttgggtatatacccagtaatgggatggctgggtcaaatggtatttccagttctagatccctgaggaattgccacactgacttccacaagggatgaactagtttacagtcccaccaacagtgtaaaagtgttcctatttctccacatcctctccagcacctgttgtttcctgacattttaatgattgccattctaactggtgggagatggtatctcattgcggttttgatttgcatttctctgatggccagtgatgatgaacattttttcatgtgttttttggctgcataaatgtcttcttttgagaagtgtctgttcatgtccttcgcccactttttgatggggttgtttttttcttgtaaaattgttggagttcattgtagattctggatattagccctttgtcagatgagtaggttgtgaaaattttctcccattttgtaggttgcctgttcactctgatggtagtttcttttgctgtgcagaagctctttagtttaatgagatcccatttgtcaattatggcttttgttgccattgcttttggtgttttagacatgaagtccttgcccatgcctatgtcctgaatggtactgcctaggttttcttctaggatttttatggttttgggtctaacatttaattctttactccatcttgaattgatttttgtataaggtgtaaggaagggatccagtttcagctttctacatatggctagccagttttcccagcatcatttattaaatagggaatcctttccccattgcttgtttttctcaggtttgtcaaagatcagatagttgtagatatgtgacgttatttctgagggctctgttctgttccattgatctatatctctgttttggtaccagcaccatgctgttttggttactgtagccttgtagtatagtttgaagtcaggtagcgtgatgcctccagctttgttcttttggcttaggattgacttggcgatgcaggctcttttttggttccatatgaactttaaagcagttttttccaattttgtgaagaaagtcattggtagcttgatggggatggcattgaatctataaattaccttgggcagtatgaccattttcacgatattgattcttcctacccatgagcatggaatgctcttccatttgtttgtaacctcttttatttcgttgagcagtggattgtagttctccttgaagaggtccttcacatcccttgtaagttggattcctaggtattttattctctttgaagcaattgtgaatgggagttcactcatgatttggctctctgtttgtctgttcttggtgtataagaatgcttgtgatttttgtacattgattttgtatcctgagactttgctgaagttgcttatcagcttaaggagattttgggctgagacaatggggttttctagatatacaatcatgtcgtctgcaaacagggacaatttgacttcctcttttcctaattgaataccatttatttccttctcctgcctaattgccctggccagaacttccaacactatgttgaataggagtggtgagagagggcatccctgtcttgtgccagttttcaaagggaatgcttccagtatttgcccattcagtatgatattggctgtgggtttgtcatagatagctcttattattttgaaatacgtcccatcaattcctaatttattgagaatttttagcatgaagggttgttgaattttgtcaaaggccttttctgcatccattgagataatcatgtggtttttatctttggctctgtttatatgctggattacatttattgatttgcatatattgaaccggccttgcatcccagggatgaagcccacttgatcatggtggataagctttttgatgtgctgctggattcgttttgccagtattttattaaggatttttgcatcaatgttcatcaaggatattggtctaaaattctctttttttggttgtgtctctgcctggctttggtatcaggatgatgctggcctcataaaatgagttagggaggattccctctttttctattgattggaatagtttcagaaggaatggtaccagttcctccttgtacctctggtagaattcggctgtgaatccatctggtcctggactctttttggttggtaagctattgattattgccacaatttcagatcctgttattggtctattcagagattcaacttcctcctggtttagtcttgggagagtgtatgtgtccaggaatttatccatttcttctagattttctagtttatttgcatagaggtgtttgtagtattctctgatggtagtttgtatttctgtgggatcggtggtgatatcccctttatcattttttattgcatctatttgattcttctctctttttttctttgttagtcttgccagcggtctatctattttgttgatcctttcaaaaaaccagctcctggattcattaattttttgaagggttttttgtgtctctatttccttcaattctgcctgattttagttatttcttgccttctgctagcttttgaatgtgtttgctcttgcttttctagttcttttaattgtgatgttagggtgtcaattttggatctttcctgctttctcttgtgggcacttagtacttagtgctataaatttccctttacacactgctttgaaagcgtcccagagattctggtatgttgtgtctttgttctcgttggtttcaaagaacatctttatttctgccttcatttcgttatgtacccagtagtcattcaggagcaggttgttcagtttccatgtagttgagtggttttgagtgagattcttaatcctgagttctagtttgattacactgtggtctgagagatagtttgttataatttctgttcttttacatttgctgaggagagctttacttccaagtatgtggtcaattttggaataggtgtggtgtggtgctgaaaaaaatgtatattctgttgatttggggtgaagagtgctgtagatgtgtattaggtccgcttggtgcagagctgagttcaattcctgggtatccttgttgactttctctctcgttgatctgtctaatgttgacagtggggtgttaatgtttcccattattaatgtgtgggagtctaagtctctttgtaggtcactcaggacttgctttatgaatctgggtgctcctgtattgggtgcatatatatttaggatagttagctcttcttgttgaattgatccctttaccattatgtaatggccttctttgtctcttttgatctttgttggtttaaagtctgttttatcagagactaggattgcaacccctgcctttttttcttttccatttgcttggtagatcttcctccatccttttattttgagcctatgtgtgtctctgcacgtgagatgggtttcctgaatacagcacactgatgggtcttgactctttatccaatttgccagtctgtgtcttttaattggagcatttagtccatttacatttaaagttaatattgttatgtgtgaatttgatcctgtcattatgatgttagctggtgattttgctcgttagttgatgcagtgtcttcctagtctcgatggtctttacactttggcatgattttgcagcggctggtaacggttgtttctttccatgtttagcgcttccttcaggagctcttttagggcaggcctggtggtgacaaaatctctcagtatttgcttgtgtgtaaagcattttatttctccttcacttatgaagcttagtttggctggatatgaaattctgggttgaaaattcttttctttaagaatgttgaatattggcccccactctcttctggcttgtagggtttctgctgagagatccgctgttagtctggtgggcttccctttgagggtaacccgacctttctctctggctgcccttgacattttttccttcatttcaactttggtgaatctgacaattatgtgtcttggacttgctttctcaaggagtatctttgtggccttctctgtatttcctgaatctgaacgttggcctgccctttctagattggggaagttctcctcgataatatcctgcagagtgttttccaacttggttccattctccccatcactttcaggtacaccaatcagacgtagatttggtcttttcacatagtcccatatttcttggaggctttgctcttttctttttattcttttttctctaaacttcccttcttgcttcatttcattcatttcatcttccattgctgataccctttcttccagttgatcacatcggctcctgaggcttctacattcttcacgtagttctcgagccttggtcttcagctccatcagctcctttaagcacttctctgtattggttattctagttatacattcttctaaatttttttcaaagttttcaacttctttgcctttggtttgaatgtcctcccgttgctcagagtaatttgatcgtctgaagccttcttctctcagctcgtcaaagtcattctccatccagctttgttccattgctggtgaggaactgcgttcctttggaagaggagaggcactctgctttttagagtttccagtttttctgttctgttttttccccatctttgtggttttatctacttttggtctttgatgatggtgatgtaccgatgtgtttttggtgtggatgtcctttctgtttgttagttttccttctaataggacccttagctgcaggtctgttggagtaccctgccatgtgaagtgtcagtgtgcccctgctggggggtgcctcccaattaggctgctcaggggtcaggggtcagggacccacttgaggaggcagtctgcctgttctcagatctccagctgcgtgctgggagaaccactgctctcttcaaagctgtcagacagggacatttaagtctgcagaagttactgctgtctttttgtttgtctgtgccctgcccccagaggtggagcctacagaggcaggcaggcctccttgagctgtggtgggctccatccagtttgagcttcctggatgctttgtttacctaagcaagcctgggcaatggtgggcgcccctcccccagccttgcggccgccttgcagtttgatctcaaactgctgtgctagcaatcagtgagactccgtgggcataggaccctctgagccaggtgcgggatataatctcgtggtgcgccattttttaagcccgtcagaaaagcgcagtattcgggtgggagtgacccaattttccaggtgcagtctgtcacccctttctttgactaggaaagggaattccctgaccccttgtgcttccggagtgaggcaatgcctcgccctgctttggcttgtgcagagtgcacgcacccactgacctgtgcccactatctggcactccctagtgagatgaacccggtacctcagatggaaatgcagaaatcacccgtcttctgcgtggctcatgctgggagctatagaccggagctgttcctattcggtcatcttggctcctccccgatgtatatagtcttttactcctttctctcataccgatgctctcagcaaattgttctgtctcaaccttgaaagtatatcattatccagtttgtactgccacaatattggtccacaccatcaccatctcttatctaattattgcaatagcttcctaattcctcttccagcttctgtctcagaagatttgatcagtgtcattataagcagagagtacaagggccactgtttgggccaatttttttcaaaaaggggatttaaaatttcttcaagtcctaggacagaatctcttaatgccctatagaatttcatgtcccatgtcttgagagaggtgattttctcctctatgtatagtaaattgaccataatattaagagctttccagtatagcctctgggaatatctgatttttgggaatagccttttgatggacagttgccctatatatcctaaatatgttactaatcttaaaataatgagaatataatgaagtgtactcaccactgaaattctcctgaacataatcttctttttaaacatttagaatgaacttcaggatttggaacatgcttcaggctgatcattaggaatatcagttatcattgtatagtagaggaagcactggttagtagagatttccagttgagttagtgtcagaaaaagcagcattctgtcttctaaaattaaaaatagtttaattctttctggttattttcccctctgaaatttggggcataaggttacctactgatattgtggtagcagtgatggttgactggatttatatattacttaatggcagattttactttaaaaagggaagttcagtgattgaattttgcaaacactttatctgacttgtatatgccttagcttttttatttatttatttggagacagactcttgctttgttgcccaggttggagtgcagtggtgcgatcttcgctcactgcaacctccgcctcctgggttcaagtaattctcctgtctccaagcaattctcctgtgtcagcctcccgagtatctgggattacaggcacacgccaccatgcctggctaatttttgtatttttagtagagacagggttttgccatattggtcaagctgttctcaaactcctgctcaggtgatccaccctcctcagcctcccaaagtgctgggattacaggcatgagctgatgggtacagccggccttagctttttaaattttaaatgaatttcccaactatgtagacatgaagtcctttctggtttagtgtcaaaataaaagatactaatgagaatgtctttgggacataattatgtagatttaaaggagtgatgtagttttaattatgccctttagctagtgtacttacatattaagctcattcatgtctccttttccctctgaaacattgcttttctcaagccctaaattagtaatcagctcatgggtgtacctgaaggttatgtaagttaagttgaaggctgccaaagaatgtgtttaaactactaatccaaaacatactgtttatagttagaaaaaaatggcccatgggtttacagtgttcttcgctggattgacatggaggaaattccagccttgtatgtttatgtgttcctttctctttccctccccaaataaaaaacatcctttggttggaatgcattgaaacatgtaatatattgtctccctttggctatttttattaaactcagggaacttgaagtaaaataataatagtaatatgaaattataagtttcctttcttttttttacctttttacttttttggtttgtttgtttacttttattatgggcttctagatttaatagaaaagtagctacctcgaagctatgaagtgatttattcactttagggcaaaacttatgaggctaccagcccctattttgtgggtggttttgtttttatttgtgagaagctagttagggaaaatcattggtaaattttaaaaagaaaggctctgaaaatgttttgaggctaaattttctcttaaataatagtaaaaatgtagaatttataataggagtcagtaaactttctttaaagggccagatagtaaataaattttgctttatgaaccatatggtttctgttgcacttactttgctgctgcagcatgaaagcaaccatcaacaatatttaaacaaatggatgtagctgtgttactatcacaaaaacaggcagctgtctggatttggcctgtggactggccatagttggccatctcctaatttagaatgtggattccttaaatttttttctttattcctttttcaaactgacattaaaacacactgacattaaaacacactgatatgtgttttcgcttttatatactttttctcaatgatcataatagtttatgaaacaagtggagaaaatactttaaaaaaatttaacattatcaaaaattccaaatgtatacaaatacaaattctcacatatctgtcatcatactaaacagttatcagtcttttccatattttatttatttatccctttttattctttgtgttttagctatttttgaagcaagtttcagactaagtcatatgccgctctctctatataaagatattttttatgaggaactggctcatgtgattatgaagcctgagaagttctatgatctgctgtcagcaagctggagactcgggaaagccagtggtgtagttcaatctgagtccaaaggcctgagaactgggggagccagtaagtcccagtccaaggataggagaagaccagtgtctcagctcatgtggtcaggcagacaggagaattctcccttcaccttttgttctattcaggctctcaacaaatttggtgctgccctcctacattggggagagcagtcttctttacagagcctactgattcgaataccagtctcatctggagacaccaagacacactccaaaataatgtttagctaaatatctgggcatgctatgatttagtcaacttggcatgtgaaattaaccatcacagatacctatacacagcagtatgcacctctaaaaaaaatagacactttcttacataattgtagtgttactgtcttatgacttggcaaaattagcaataatttttggtgacatcagatatccagatcatgttccgatttctccaattgcttaaaaaatgttttgtttttgtttttacatctggtttgtttgaactaggatttacatcaggtcacgttagatttggctgttgtctcataaatcttttagtaatcccttacctctccttttctctctccttttttgtttttgtttttttcagcccattaacttgaagaaatgagccagttctatatgtttcacattttgggtttgctttttttgtggtgtcatttaatttgttactgtataacccattgttttttttttctgtaaatggaattagctctaaagacttatgtagattcaggcacaacctttttggcaagaatccttcataagtggtactttatttttcatattgtgtcacataggaagcgtattgggtagcagtagtttgaagtctctgttttgttaagttcttcaacaagtctatatctaatggtttgtctatcgaatgatctttccaaaatcacttacattatttttatttctaaagttattagctggaattcttctgtaagaacatttccaaatcatcttaagtgtttggcttcctcagaaataaataagggagatcatatttttattccattctgtaccttagtattgagtctcaaaaaggttaaatgaattgtccaaacatataaactttgtatcctatatagctcagaatcaaacctaagtttttgataccaattctaattatttcagatgcactgccaatgggagtcagtcagttgacatcgtaacaggttcttctttgttgttgtacgtatagctttaaaagttaagggatgagaaataggatgatttaggataagcccctttcctgttttattttctgcataaattcaggaaagaataggtaatttcatctgacaaactacagatatagttttcagagcaattaagtgcttggaaatacaattacttggattcaaattcttgctctgccacttagcagctgtaacctgacttttggcagtttccttaacctttctgtgctccagtttcttcatttgtgaaaagaggatcctaatagtatctgtcctaaagggttgttgtgaggacgaaataaagctaatacaaagaaagtgcttagaaccatgccttgtacatagtaagtactcaatatcattttgcttttcagaaataaaactgtcccatggccatacctttacttctaccagtcatccaaaccaaacattagaaatattgtaattttgatcagcatggggattagaaaaaaaaaagaaaaatattgtaataatcataaacttgtagatagtggttgagaagatgtataaaatctgaatgtttgtgttttagattttttgtgtttgaatttcttgatggcttgatttaaaatttttttattttatgatgtaaaaccattctgtttttcacttttactacagtgttcaatacattacatgagatatttaatgcttttataaggtaagctttgtgttggattagtttgcccaactgtaggcaaatgtaagtgttctgagcatgtttaaagtaagctgtgatttttggtaggctgggtgtattaaaattcatttttgacatgatattttcaacttatgatgggtttatcaggacataaccccaccataagttggggaaggtctccacttttctttagagtcttaaagctcttccccaagtgcagtaggaaaagcgatcataagtattgccttatattcactaggacataaaatacgttattgtgtagtatgtgagaaagcaaaatgccctttgccttttcccccccgtttttcattacctacttgctagagttatagatagtatcacttgattgaaattgtgtttataatcacatcttagtcatgttgggggagattttttatagacatgttttaaaagatccttttagcaggctatttttcatcatttaaagagcaagagaaatcatatttttccagaagtactgcagtgaaatctgcctataactataattctgcattatgttttcatagttgacatcttaaaatgtgaatgaaggtatgtatatgcatttggtttgattttagactgtttgttcataggcatttcttctctgatttgttatacaatattatgaaaagctttttgctatatatttcctgagctgtcaaaaagtatctgactttttgagtatgactgaaaaaaatacttcaaaaggacaattgtgttcaataaatatatagtccatattatttaaaaatttgcccagtatttgaaaatgctttgtatttgaccacataaatcagagtgggtatgcccagtccaattttctaggtggataggtaggaaaatatgtttttccctgaccaataatgtcatctattatgtcacccaaatgcaatgaataacttggttttgttttactgtaaagatcctaaaccttcttttattggtcttttcccctttgtttatgtgagattacatcatctaatctgaggtaggaagagctgccatctgaagaactgcaggtttgtaggcttctgtgtcaatattttatggggaaaacccctactatttattatttattccttgaatcagcttttcagtattacttgttcactacatgccccagcatttctgtatttgagaatgaaacaccattgtagaacattatgatagactagaataaaattggaagcagtaatcatggcttttctatttaacagttttgattgtcaaaggaaaatgtatagaaaattctattcttacaaagatattaagggaataataaaaatggtgagcaaccatgtggttaaatgtgaagattggagagctatctaagacttaaagggggtgtgcctgtccaggtactttgctacaaatacatgcgttttcaactatgctggttaaagcctgagcattagaaagaaaattggatctaaaggctgaaggccacaggccaggcccttacaacctctttgggagctctgaaaagctttttaccctctctgggcctgttttccccccaactaaaggaaagaaagagtgcctgctttttggtgacgatcaagacttaagtacattttctataagtgtaagttctttctgaacttcagattgctattccaccaaagttaggatgagctatattggttatgagggagtacagtgatgattatttgggtctgttaagatttaacttggttcatttcatcattctggtcaagatacttacttttcctaaggtctgtcttatgctctcatttttatatgggaataataatctctattttttgggttcttgtgaggagcagggataatgtctgtcaagtgcctgacacactgctgagcacatataggcactctaagttgtagctgttgttaatttactttaaaaaaattattgatagttaacaaatactattttatgcatgttaatttgaaaggaagtaaatgagcccttttgatagcaggaaaagttgcagatattaacagtaagtggcatttgtgaagagcataattttccaataattttttaagtaattggattagttaaaaattaattgttgcaaaattaagtaaacaatattgatttttcttaaaaccaaaacactgataactacaaaaagtaaggaagttctaagtctagatttgcttatggtctttcttttctccctgaatgccatcatctatgttcattactcagacttttttgaaaatagaatttgaacataaacttgtagaagtataattaaatgagaaaaatatatattgaggtttataatctgcctgtgaattctaaggtgaattcatcaaccttcagtttttatttcagttcttacccttttcttttcttttctttttgagatggagtcttgctctgttgccaggctggagtgtagtggcacgatcttggctcactacaacctctgcttcccaagttcaggctattctgccttagcctcctgagtagctgggactacaggcacgtgccaccatgcccagctaatttttgtatttttagtagagacagggtttcactatgttagccaggatggtctcgatctcttgacctcatgatccgcccgccttggcctcccaaagtgctgggattacaggcttgagccaccatgccctgccgctttgtttaactttattagttattcttgcccattattttcttgtggatgtgaacatgaattgtatgtgcatcagaagccatatttttagttcgttaactcatggcagctgctgagccatggtgagatctttaagaaaggtaatagaaacacttgtctaagaaaatggtaggaatctaagttaactgatgtgaaagagctgtgtatacgtctctttattgtgctgttttatataggtctataatgaaagccaaatgcctttgtttcgtctttttggtttgatgccttgccagtatcatagagcaggaaatgaattttatcatttcttttgtgatcacctaattagcaaatgtctttaatttccttttagaattcatgaacttgattatattttcctattcactgtcagtaataatcttgactatcccatttctctatatgctgctggctttctcttcatatctatgaacagcactgtttttctaacattaagataatttttctaattgtgttgtcaaatactcaggaaatgaacattgaaaggatggattcttttctggggattctaataaaaaagtatcaagtggctttccaggatgtaaaggagcaataatataggtaaaacagtgcctagaacagagtaagccctcaataaatagctattattatggttagaaaataacttttatttgccaaacagtaaatcacaaattttgaactatgcattcaagattattgaattttgcagtcactattttatggctgttgagaagagaaatttccactggtcatcagtttttagtgagagacttcaagaaagtgtgtaaactttcttcatcttcaggttgtaaagctgaggagcattttttttattaaagttaccatgaaattggtgtcattcctgtaatttttttgccagcaagatatgcacaggggcaatttacagatagaattttattggaaaagaaaatctatttgatttacataatgataaaacagtaaagaatgctgtgttcctctagttccctcatattgaggtatctaaaacccaaataaaaaatacatgaaaagcattttctcatcttttttaccttttaatcatttccctttagaacacctgtcatttctgtcaaaagattttgcataaacttataattttattgcattattattttgagctttaagatggcaaattagaaatggcatatcttctttaaattattatcaaagcaaaagttcctacatatcagtaaggtaatgaataagaattatgttttttcctcatgatctccctattgtgcctattattatacagaacaaaaacaacaatgaaggctgggcgtggtggctcacacttataatcccagcactttgggaggccaaggtgggcagatcgcttgaggtcaggagttaagaccagcctggccaacatggtgagacccagtctctactaaaaatacaaaaaattagccgggcatggtggcgtagcctgtaatcccagctacttggggggctgaggtgggagaattgcttccacctgggaggcgtaggttgcagtgagctgagatagcgccactgcactccagcctgggcaacagagcaagagttcgtctcaaaaagaaaccaaaacaaaacaaaacaaaaaacaaaaaaacacaataacagtgaatacattcccttcttacgtaagaaacacaagtcaggctcagaaaaccaaaatttatttctgagggttccagcaaatttggcaaattagtcattattaattgggtccatagcctccaaagacttaaattcataaccccatttctagtggatgacagaaaatgtgcgaggcacctgaattgtttcagttatcaaggtggagctgtcttgattcatgtaaaatccatgagaggaacctctaatcactcctagttctgcctccatgtcaacccctgtatgtgttaaatacttaccatcttactttgcatttgttgaaatgtttctctatatttgttttatcgttcatgaatattttgtatctccaactacaatttttaaatcctagatttttttctaagttatgcctcttatttcctgcctgcttcctcagtgtccagtatagcaccctacagtctatttctttaagggaagaaaaagtttaattaatgaacaagatgctgtcaatgtagtatagcaaaaaggagaagaaaatgcacattaaagctcccttttattttgctttgttcaatccccagttgaatggaatagtgttgagtggcagccaaaaccatggaatttgagattacttgtttcaatattgaatgaagcctcagctcagagagatgggttttagtgcattttttttcccttagtggaattaaggtgactttcctttgcacgttgtgtcacctcaatttaagaactaaacagcttgcgcttgttggttgggtaacttaattttgcaggtttgtgggatatgatgttttcataacggaagggaagatagataataatcctctgaacctttaaggaattgagatttaacagtacattatacatttatatgcaattttgtgtgcatacctgtggaatttatagtttttcaagatcctcactgtcaagcacagtgggcataaggcagagagatttaagggaatagagagatgtccctgccatcacggttcactgtccagattggatgaatatagctaagaaagagagaccaaatcacgtgatgggggatacatccattgtttaaacaagccagagcagcacattttgtgaaaggtgaattatttggtattataaggtaaaacaaattctagcctttttacaaatcacctaatgtagctgcttgggaaagggctctcatctgccactacttaagtttgaaaagtaatgttatgcttttctttatttagttacttatttatttacttttgttagagataggttttttctctgtctcccaggatagaatgcagtggcacagtcatagagtaacctcactgtatgtgaggttaacctcaaactcttgggctcaagcaatccttctgccttggcctctcaaattgctgggattacatgcttgagccaccgcacctggcctatactttcatttatttagaagcaagttaatttgtcaacttgtcttggggattattattaaacaaattactctttaagctgcacgtcaaaatagtattattcccgtaattttacatgtgttgtgtttctcattattgttctgctcatttgtatgctatataggacatcagaggcagcttttgagttttaaagaaagttcatctacatgtgaagtggctagtggagttgtgatcctagaagttatcctatcagaacaccatgctcagatttgcatagtcatcctcagctttctttttttattacagtctatttaaatgattaaatttgaattaatatatattaaagttcttcaggaacagcatttctttataaaacagaatagaaaataattcttattttatgctcagtttatgacatgataaaccaaaaagagaactttggaaattgtgtatagcagtatggtaatttaaagatcactcatataagcttttaacgattatatatacgtgtgtgtgtgtttcaggagaaaagtcgtttcatgtgataatctattcaggtaaagtatctaggtaaaatgataagcaattggatttgtctttggaagtttctaaatgtgatatagcataggaaaacaaatacgggcagaaaaatcccttaatgtaattaaatagcataataacatccttacacacatatatagagtttccgcgtagttggtggtagagacaagttgtaatgaattaagcccaaatttgaacttcaggacttttgagtttacctatctactcttctgctatggctttggagaaataatctattactcagaaactttagctataaaatgataactgtagtagtgaggcaaaagaataggctctgaaggcagggaacctaaggccaattcatgcaaacttcctggaactaaatcctaggaccttcatttgcataaggtgcctattcacaccagcctccgattggccatgaggcaaacctgcactgtggcctatgattggtctattttacaaccttcatttgcataaataaggtgccaatcccacttgtctttgattggccatgggccagttcactttggcctctaattggcatgagccagcccttcatttacatagggtgtaaccaatgggagacctctagagggtacttaaaccccagaagactttgctaccaaggcttttgagccactttctcgggcctctgccattctatggagtgtgctttcactactattgcctcccacttcagtaagtctacactttccttgcttgtttgtgtgtgctgttcagttctgtgttcagtgtgccaaggacctgaacaactcacgatcagaaccttctacccagtaacagtactgagaaaaatactgtaaatttatttaaaatcaactagttatataatttgcaagttggcaacttttaattttctaataattacctataggaaatattaggaaaaggtaatttctgtcatcatcaccaccaacaatatttagtgtgcctgtaatgcactagccaggaaagagggagactgagaccgttggggtctgaaaaggagcaaggaccaacttcaggatcttctacccactctgctgtactctttttccagtaaggcaggaattcttttagctcagatccagaggagagactgtgaaatgaaaaattacagggtatcgtttattcagtaagtactagatagaatcatatgaagttgctgttaatatagatcaaaaatagtacaatgtcatggcagtttcatgtagtcccatctaatatttatagagctctcggtatgtcctgggcattgttatgggtgcttaaaggtatagaacttaacaaaatagacaaaatccctgtcttcctggagtttgcattctcagagaacctccagcaagactgctcttcttaccctagagtcaggtatacccaactacctgctctgtgtctccccttggatgccaaataggctcctcaaacataacatggcccagatcaatctcctggtggataaacaatacacttagattttcttcctgccttatagatagaaatcagggctagaaggaccatgaacgacctagcccaagatccatctttttctctctttctcactgtcgagttaatagagccaataaataagatagtaatttctatcacattaaatggtgatttttatctgttgaattgtaaaatgtacccagacatgaaaagggaggctggtagactgctgaacacaactatgatgtatttgctttttctaatacattgcgacaagctattctgtatccttcactacacattgtaaatagctgagaggtgttatgattcagtgaatgagctgtggatagggaatcagcagacctagattggagttttagatttgctattgagggactctgttactcagctagccatcagcaaatataaataagttaactattcctacatacttaaatgatattgtgaaaataaatgagataattaccaagtggttggaaaatttactcttgggtgataattgatatacaaaatataggtagttttaatattcagtttaattaatctgtttttttcttaattaaggtactacagacttcaaaactttgatacgctttaaaatgtattaaattgtctgtttttgattgtttgtttgttttgagatggagttttgctttcgttgcccaggctgtagtgcggttgtgcgacctagactcactgcaacctccacctcctgggttcaagctattctcctgcctcagcctcccagattgctgggattacaagcaaacgccaccacccctggctaattttgtatttttagtagagatggggtttcaccatgttggctaggctggtctcaaactcctgacctcaggtgatccacccacctcggcctcccaaagtactgggattacaggtgtgagccaccatgcccagcctaaattgtctgatttagtctgtgctcagcttgtttttcccaactgttgttttaggcatgttcatgataatataccattgatattttaatttttaagttaaattcctataaataaatatgagaaatttgttaggatatttaaagcatcttctaacctttaaaaatatgtgcttttaaaaattattaggttgtagaattgggaaaaaatgcaatttgtcttatctttttctattagcatgtttccagtgtacagttcattcaaagggtggttagtgtggcaaaacaaattcagtttcttaatgataaatcacagtgaagtacagaagtaaacagataacctgaagccagacaatgaagtttacatagcccttccttggcagagccatctttctgcactgcagagaacacaatccatcaataatttaattcagttacatttggttatgagaaaggaaccactttgtttaggggctttaattctgatcctttatcatcattcacaaaatgaagtaacctatcattactgtgatgcctgtaacgtatcactaaaagggaaaagggggaagcatttctcttccgtcatggacattttctcagatatttctatagggtttgatatgctgcttctttgtattaaataatatttatgtggtgtttatgtaggtaaatggtttaatgttgcaaaatttcaaggaaaaaaaaacactaagacatcttaaaattcccctcatctgttttaggtatctttgaactatataataaaacatctatgcctattgaagttaaatgacctgttacaaaatcatcttttttatatttcatattgggtagcatagcagtatactgtaatttgtatagttttataagacttgctggatgtcatagtaaatacaaatgactttatttaaatatatagtaatttgcctttttgacagaaaaccatgtttccccaaaaactgcatattttaatcaaattaaaaattgccactagattctgaatatagcctctgctgcttttttagcattgctgccactttaaaattttactctagttttagaagagattacttgtgtttcttgggtgggtacaggcctgtgcagagcctcataacatggtagaaagaatggagactttgaacaagtcataacaaggtttcagtcctgacacatcttactgtgtgcatttgaacatttcacttaatatttcgaagtctcaatttcctaggctgtaaaatagggatattcacaccacctttgcctagttattaggagaatcaaatgaggtaatctatgttgtacttttccattgcctggtatataaattttttttttttttttttttgagacggagtgtcactctgtcgcccaggctggagtgcagtggcacgaccttggctcactgcaacctccacctctgggtttaagcgattctcctgcctcagcctcccgagtagctgggattacaggcgcccaccaccacgtccagctaatttttgtgtttttagtagagatggggtttcaccacattggccagactggtctcaaactcctgacctcaggtgatccacccgcctcagcctcccaaagtgctggatttacaaacatgagccactgcacccggccataaactttttatttgtgagaaaagtttagattaatggaaaagttacaaaaacagtacaaagagttccatatactcttcactgagcttctcctaatattagcatctcgcacaaatattattcaactatcagaatcaacaaattaacattggtacaatactgtaactagagacttcattcacattttatcagttttctcactaatgtccttctgctgttccaagatccagttcaagactccacattgcatttagttctcatgtctccttaatctcttctagtcttttacaatttctcagtctttccttgtcttttcatgaccttgatactttggaaggatactggttactttgggtttgtctgaagttttcttgtgattagattgaggttatgcatttttggcaggacaggcgtgatgttcacttctcatcgtatccctctaagggcatgtgatatcaacacttattacttattattattaattataacttattgctggtgatattaaccttgatcacttggttaaagtggtatctgctgggtttctccactgtagagttactatgttctcctcagaacatcttgggggacatacttttagagtatgtaaaaatcctgtttccccactgatttttgtcatccctccatggatcttgcctgcaagtatcatcactaaggtgctctaaaggttattttctatttcccctattccatctacatttattattggaatgtttctataaggaaaaactgtcctttctccccgtttatttatgtattccattatttatgttggtgcacattcatggatatgtatttcattctatgctttataatccagtctttgttgttgattttgttgtccaaaatgttcagctttggccactgggagctctttcaggttggttcctgtgcttttttgacacacctccttccttcttttgagcacatcctccctagcaccacaagatgcttcagactcatcttgtattttccctgcctcagtcctgaatcaaccacatctccaaaaagtcttgtaaattctcttaaaaaaataataaattagccatctgtcagctaacatacgttttttctaattcttgatacagttttttttttttcgatacatttctctcttgatctccttcagaggcagcccttagggaatttagtctcaccaagtgtgaactattggctcctgacctttagaaaagaaacaaaccctcgcctacaacaggaggcttatagatccatgttttctttgtccttgaaattgtacaggaacagtctggcttgtcacagtaaattaaaacttcatctcatcacatttgtcatttcaaggcatggtatagtcttctattatttattgctagctttaaaaattttatgtaattttgttcttttggttgtctgttatgtagtaatgcttagatgactagaagataacatgtaatctaataagtgaaacatctcaggatattgttgtgactttgtgaaaataatttaatccttcagcaatttagtttaagagttattctggagctaatttgataattaacagtgtaagtagaagtgtgctaaagatcttgtttttttttgtaaagtttgattaattttgacattgatagaaaaaggtatattttaatatgctgtgagtaaccactagagggtagccctgggtaaccaattgcccatttgctgcttatttaagttgtcctgacacagaaagattgaaaataaaggtgggcatggggagggagggtgcagataaaagcaaggggaatttaaaagaaacttggagtgacaatgttatacaaaatgcagtacaaggagaaaagtattaaaatggacaaagttatatttttatatgtgataaaaggtatagtctactaatataaggccattctaaacctttatgcacccagaaacatattgaaatatatcaatatataaaaatatttaaatgtttatataaaaatattgtttttcttaacatttgtaggattaaggagttatattttgcagtcttcttggtagctcttcaaaaccctagactttgccaggtgcagtggctcatgcttgtaatctcaatgaggctcaaaggcctcatgcctttgagaggcccaggacagagggttgcttgaggccaggaatttgagacctgccccggcatcatagcaagatctcctgtttacaaaaaataaaattagttaattaattgaaagtttaaaaaccttagacttattgcacataatagttttactaggttatgagtagtgtaggggagaaaagattttttccttacccatctttaggttcatggctgaggtcctatagcaaaagacagattaataagagaaatgcatacaaatttatttcatatgggttttatatgacatgggaaccttcataaggatatgaaaactcaaacaggaaaaacgttttatgcttagtttgatgacaagttgtcatagggaagtatgataagataaaaggggtataatctaataaactggggagaagcttgcaaggcctatttgttcacattcttctctgtatccctgtgtcttcagtgataaggacatttctttcctccagggcatctctggaatgaagttcttactgagaagagaggtcaaagaattctttctaggttttataacctgctttaggggagaagggtcgaggggataatgagagtgatttttctgcttttgctatttcctgaaatgccaaagtgccatattttgggatagcatgttttgaaccccatctgtagtatctttagacatctttttgatgatcaagttagattttaaaaattctatcaaaatagtcaatacttgaaaatattcactgttgagtaaagtgaccagataatgaattctagaaaaacaactatgaaagaaaaaaaaaagaaaagtgaggtgaggacagaaaataaatctgggaaaataagtaaatagggtgaaactaatctagtaaaagtgaaataaatttgcatttaattcctcaaaacatttttaaaaatcataattcttgtttctgtgaagaaaaggcagcttctctctagattagctctgatcagctaattgtgcagtctctgaatgcagtattggatgatgttttcagttttcttgtttctgtggagtgaaaagaccatttattcaagctgagccaactatctgggactagcaaattctacatcactcagcgtactcctgtggttttctggtgatacttgttttatgttggctccttttctgctactgaggtagagactaaattgaccaccttttaaggattactaaatctagtcttttaggctagaagtatgtgattagtaaatgttttacttcctgagtgaagggttgtctgtggtttctatctcaaattttggcaaattatatttggaagtttaataaattttcattgctgttacatcagtggcattcatatcaatgaataaagcagatttttctaaaacaagggtgaaaattttatcattaatatatcattaatagtaggcacacctgtctgaacagatagctgatgaaaattatctcctgtagaactccccctgaccatttcctccaggttgaactgttgaaggcctctatttaaatagtatgttaagttatagtattttggggcaggaacttacttgctaaatctttttttggcactgaaagttaacagagaagtatgtcataagattagctttcagtcctctggtggggatgaccctgtgaacatacagtcctaaaaagattcctaacagttcagccaagtaaacattcattgagcagctgcaatttgctaggttttgtgctacacacagggtttaaagaagtgaacaagaggcgcatgaactaggcaacgcagggtctaaggccttccagaccagcatcccatgtagctgggactacaggcatgggtcaacatgcctagctaattttttaaatcttttgtctcactatgttgcccaggctggtctcaaactcctggactcaagcagttctcctgcctcagcctcccaaagtgctgggattagaggcgggagccaccatgcctgttagaaagttttttttttctaactcacttagaaactgcaacttagggttagaccctctgttccttgttttactatcaaataatggctgcactaggtaaggtctgaagcctgttccagcttttaaatcctaattctaactggtaagaaaactaaatttgctaaggctccagatcaagttgctagtttaataagcaatggcatgttctgtatcctttcctctccatttgtatacttccttttctctgattttgtacttcagttccttgtcgtgtcctcaacttgataattataggaagttggaatgtgaagaaaactggccatttgaaagcatactgaaacactatttaatattttttagttcagacttttaacttcaagtttgccatattttattattctaaaattctgttaaattagaaactggataagtaatatgagtgacttgttagagttactatttctttagagagtagataacttttctctggttttcgttgaaatcagaaacattttgtttaaccgtggttcagtgcgactttcagatgacccttgaagcaactgagtgacagtggggaagcagcctgtagttgaatggataactgatagttggttatatgtgtttatttcttttctccatttataattttataatattttctttattattattattattatactttaagttttagggtacatgtgcacaatgtggaggttagttacatatgtatacatgtgccatgctggtgtgctgcacccattaactcatcatttagcattaggtatatctcctaatgctatccctcccccctccccccaccccacaacagtccccagagtgtgatgttccccttcctgtgtccatgtgttctcattgttcaattcccacctatgagtgataacatgtggtgtttggttttttgtccttgcaatggtttactgagaatgatgatttccaatttcatccatgtccctacaaaggacatgaactcatcattttttatggctgcatagtattccatggtgtatatgtgccacattttctttttattattattattattattattatactttaagttttagggtacatgtgcacagtgtgcaggtttgttacatatgtatacatgtgacatgctggtgcactgcacccactaactcgtcatctagcattaggtatatctcccaatgctatccctcccccctccccccagcccacaacagtccccagagtatgatgttccccttcctgtgtccatgtgttctcattgttcaattcccatctatcagtgagaatatgcggtttgttttttgttcttgcgatagtttactgagaatgatggtttccagtttcatccacgtccccataaacgacatgaactcatcatttctttcttttctttttttttttttttgagacggagtctcgctgtcgcccaggctggagtgcagtggcgcaatctcggctcactgcaggctccgccccctggggttcacgccattctcctgcctcagcctcccgagtagctgggactacaggcgcccgccacctcgcccggctaattttttgtatttttagtagagacggggtttcaccgtgttagccaggatggtctcgatctcctgacctcgtgatccacccgcctcagcctcccaaagtgctgggattacaggcgtgagccaccgcgcccggccaaactcatcatttcttatggctgcatagtattccatggtgtatatgtgccacattttcttaatccagtctatcattgttggacatttgggttggttccaagtctttgctattgtgaataatgccgcaataaacatacgtgtgcatgtgtctttatagcagcaggatttatagtcctttgggtatatacccagtattgggatggctgggtcaaatggtatttctagttctagatccctgaggaatcgccacactgacttctacaatggttgaactagtttacagtcccaccaatattataattttataatattttttagaatgtagaagactaggattttaatttcaggtttcccattaagtaactgaaataactatccacttgacttctggaaaccttagtttcctcatttataaactacaaatatctaatttgcataccttacagttagtgaaaagtccaggaataatcatcttgttaaccactaaagatctatagaaatgtaagctactgttgttgaaacatcactaagtgttaccctggtttgtttttgtttttgtttttgtttttctttttgctaataacagtagtgcatttgtactcaattccccattaggaatttagaaattttatttattaaatatctgactgaatagatatagttagaatgatgcaaatcacagagccccaggtgacaaatagccgtcaagtgttgttttctgagtctatctgggtatagtgaaaaagatgaaacaaacccactagccagcctacctccagtattcctgaacagatagctctccattttcctctgatgattatggcagagcctttgatacacagctgacctttcttttgatctattgacatcactgaaagtggtctgcttaatgagtggccgcatcagtttacataaggttattctatttaatacttattctgtggatttttggcatttcactatttcctttccattttctgaaaacaatgtggtcaatgaaaattttaaaactgtgtcttgaccttgccccacgggaaatttgagaaagaaattctgtatactatggagtccagaactgaaaatgttctccatgacttcaggggaagagattaagaaatgaagatgaagaacatatgtcctgcttttttggatggaaccttcataataggtgaaatttttacaatttttaacaccttttcaggggaactcccaggagtcttcagagatatatttgattataaaatgaactattttataaatttcaccttttaaaaatggcacaaactagtttctacaaattttatacacataattgtagcatataatacatacttacagtttagtctacaaagagactgaggtaacttataattgcctaacataattcagctagtaggtggcagagttagaaccaaaatctgtgttatctctgtaacactttgctgcttcacaagcctgtgaaaagttctcaccgatgagaaatgaattaactcttacagagcagaaaaaggaatatttaatacaccataggaggtaatttgctgaattagagtaacaaaagcaatgttttccagctgtgttacagacttcaaactgcttaactgatttttttaagctcctatgaggagttagagagagtaactagatgcaggtttttctaatgaagaagctggaggcaaaacataagtaatttaagtaatattaaacaacacaccgggtctcacctactcatgatagcttttcctagttaatagtaaaactgacaaccttggtaatgttagtaactctaaagtattgagtgcttactattttttaaagaaaagtggagctgtacattacagtagttaaagtggtaaaaacagattttattcaggaactactgtaataggggaagagagaccttagtatagaacaaggttcaattctgaatacagcatagaccagtggggatttatagccaaagagcaagatggcattaatggatgaaaaattacggagatgaaagaaacttaaggagtggggagattgtggttaagccaacctaaaatgattcttgctcaagacaggctgagtgatgagataccaaggcgggtgttggagagtgcagggatgcagaatttgattagataccgagggtgatcaaatattgaaggtgaacagatagtgagggtagggggttctctctaaactgactgcaagattcttactacaactgtgctatgcaaaattgaaaccaaaggtcaaggcctggttgagaagaggattccgaggagcctgacttaagtttggccaaggagggcatcttgtcagttgctccttttgttcaaggaaataaagcattattctcttctctcagtaatctaagtccatcttgtgttcagttccttttcagtaaagacgtgctaaaccatctgttgagacttcttaatgtcttgagatcatgggtagaacttatgcccagttcttgtagctgttctttctatctaagtcaccacctgagtaaccaagatcacctacaacagaacctatgatgttctggatacctcttttgctctcatagtgagagtgaggtcaactggagggataacttgttttagagataactttaaaaaatgaaagaaattgtggggaatcaagtagatgaagggattagtaagattagagaggtagtgagatccattccagttggctggtaacagctaataggtttgagttccacagacagagtaagaatcattgagtgctagcctggagtcataagataattatctgatggctgaaggtgaccaaagaataaacatttcgatgattgagaaaggattttttggaggtggtctgtgtgtggttgggttgggtgagagaaattaggctgagaggggaagtggggacatttccattcgtatgagagatgtccaggaacctgtagtggcttggaggcattatgttacatttaatgacggctggagaagtgtaatgacaaatgcttgttcccagaaaagaattgatgatggtaaaattatgatgggagtggacatgacccttgcaaggatagactggagtatattcagaggtttttctcacaatgggtatttgtctggtttaaaatggtggaagaaaagagagggaagttatagcaaaataggaattctgatttctcacaggaatcgtggaaatgccaggtgtgcccacaggaaaggaagcacagtaccctcagtctgtggcattatgggaagtggtgactagtccagcccaggcttgccaaaggctctgtggatgaatagtcttgctaacagataaggaaaaggcagagctgggggagaacaaggagctcctaaatttaggaacagaaaaatataagggaagactaatctcagatgaagaaaagtcatagtgaaggctgtgaaccttaaaggcaatcatcagtctatgagaaattaggtatccacatcctacaatagcccacaagatccaaaaacctctgttattttgtttcaggaagaggaaaatgatgaatagtagaagctccacctgtgaagataattttacctgcagctgaaataccatgacccagatattgaacacacagaataattaaacttttcgtctagaaactttgtggtcttttcttgccattgccttaaagtattcagtgtcctaaagggagttgtcataactgaaagtgcatagaaagaggtcatttacatattggattacagtggagtcttctgggaattttaactccatcaaataggttcatgagaaatatgtagggccttagtaaatcgttggggcataacagtccaggtgtattgtttattttcccaggtgaaggcaaagtagtgagattctttatgaaggggaatattataaaaggcagaacacagcccagagcggtggctcatgcctgtaatttcagcactttgggaggctgaggcaggctgatcacaaggtcaggagattgagaccatcttggctaacatggtgaaaccccatctctactaaaaatacaaaaaattagctgggcgtggtggcggatgcctgtagtcacagctacttgggaggctgaggtaggagaatggcatgaacccgggaggcagagctttcagtgagctgagatcaagccactgtactccagcctgggcaacagagtgagactctgtctcaaaagaaaaaaaaaaaaaaggcagaacacaaatgaatcaccatgaaatattgcatgttggaagagataaaagacaggatagtgttaggattaggcaccaagggaaatcttgatttgacagtgtaattgatagatcctaggaaggaactgatatcctttcccacttgactttttaatagccaaatgggagtaatgcacggattagaagtggggactcatgtctaataagcctctcattatcagggtgatcaaccgctagtccttgtggttttaaacgatattggggaatcctggggagaggcttggaaggatctgtttctaccttatatgggttctgtatcgcatataccttagataattttaatagtttgcttaaatctgtatttaagtagataggttgaagtgggcaaaggaactccctgcttgggggaagtcagacaaaaccattaggggacatagacatgaagaggaagactcaggggtgggtagaagcagtccagcaggaatttttgtacctccattcatgagaagatactttccacacaagtttactggggtagtggagctgagtagaaaattatgttgacctttacgaggtcccatagagatatgaggatgagctgagggcaaagcatcaaaacccaccactggtaaagtttggtgactgtggggaagggggcaggaagtgaggtcatgttgagggtagaatgtgttgtcctggtatcgatgagagacgtggaggccctttaacttgtagcattatttcttcatgcaagtttagtagtagttgagggcattgggacatttgcttctctggaggaaaatagacaattctctggtgaggagggggacttgggtttttccctcctcttgagcactgggcaattccaggcccagtgtcttttttcctcatgatatcagcacattgttgagatcaatgggagccttccattgcggagcttgctgtgagttaaaaatttcaggtttttccagttgttttaactgcagtgccacaagcttacattgtgtattttccaatgtttttgaaatactattttcatattattgggttaatgtctgcagccaagacatgtatacattttgttaattaatattatttttctgtaatgtgtcatagaggtctggcctgaaactatttataaagattgcatggcctgagcagaggctgtttggaaagtcagttccacccctgaattctctttccatgttgtctttaattgatggtgatagccacagtttcatcagtttgttatttacaatgttagatatgtgaccaatcaattttaatgggagagattttatggatggcttctagtaatttcttacttccctcggggtatcaggggtagcctgagacccttgagtgcacccaaggaaggaactgaggttcatcagaaatagtggtccatttagctttttcaaagcaaagggaggcatttccaggcccaaccaacagacagataagttgatttaaatcagggaatcccagagagtatgcacctagaatgattctaaattgttcaacaaacctttccctttcctttctgtggtcaggaaagtatttggtgataggatgcaattcaggcctagaccaaggtttaaatgttctctcttctattagcctcacttgggaacaggtactggctgatcctgggcttcatctgaaggagatggaggccagtgaaccttttggttacagggaggtgagggactggaggagggggcagatggtggaagagagtttgggagaggaggctataaaggaaagctgggaggggaatatggaggtgctgttgagagctctaggaactttactgagtcagaaaaatttttctacagacagtgtgaaagagcctcagtagtttgagatttgaattatttagctgttttttggcttcttaataccaagtgaaataagcagaccgctgtgcatccaaaagctttgttgctttttgccctagggctgtttttagatggactaatttagggatataccaggagcccccaccatagctgaagagagtttttggtaaagctttgccagtgagaaagcaagcagacagtattagaactatagtggcaaagcaggagtttgctaaggtgaggtttcaattgagaagttcccatgggagaagcaggattaaacagatagaagagagaggcctcataaagagcagggaaaaaattccagcccaggcattggggagtggatccccactggaaacaaagagccaggagaagtcttcatcccaggagacaaagatccaggaagaattttccagccaagagccaggctcaggagtcagggagtaaatgtcttcttgacgcagtgagccccagaaagaaagacttctagctgagtagatgcctttcaaacaaagaagtctgggcctctaatccagcttcagacaatgtaatcagaatcttaatcaaaatctgtcctcactgtgattcgatggacgtttatctggagcactggatattggagtcactcaccaccagatacccaaaaagcaagcagactgaagacaaagtcttggtgtgtgcttagagattggttattgtgtccaagagtctaacggtggttcagatccagatctgaatcatggaccaaaaactgttaaagaaaaataagagataatagttaaaatggtaaaaacagattttattcaggaaaagctgcaatagaagaagggattccagtatagaactgggcttaattccatatagagagcatgcacaagtggggattcctaattccaaatagcatggacaagagagcagggatgggggtcagtggatgaaaaattactaagaggaaagaaacgtcacgggtaaagggattctggttaaacagaactaacaggatccttgctgcaggttggccagggtgataagataccaagggtggcagtgaggaatttgatcagatattgagggtgatctcaatatctggggagttctttctcaactgactttgtgagattcctgttacaactgggtgatgtaaagaggaacacagaaatccaaagctctaggcctagttgagatgaggattcagaagagcctgactaaagtttggtcaaggagagcattttatcacggtgtgcagaacgctataccaagtactttatgaaaatgagctaacttaatccccaagtcaaccctatgttatagatataactccttttttacataaaagagaattgttgcaaagaagttaagtaaactgtccaaggtcacacagctagcatgtagtagagacaatacttaaacttgagtatctgacttcaaccattagtatttactgcctcctggactccttggggcctccacatctcctttggtgtgttgtttggttagaatatgtgtgatgttccaatgatctctaagagttaaactgtgtttgaagttaagagttaaagggaagtatttggatctataggtgactgattacaaatttagtttaatagatagtaattgagtaatttagttacataagaatttaaaagggggcaccatatattaaatgcctataacatcactctggttatgaaaattatacattagactttaaagtagtgactcaagacaacataatcaataggtcaaaaaattatcgcaagaatgtgcactaagaaaaggccataagatggttttctgcccttttcctcctggcaggttcacttatatgtgtgaccctgatgctgagcttgaattctgttagtacttatgataactaatcttcataggacctacttctaatgattttggtatcctaaattctgggcagtggtgagtaataatgaggtcactttgtagtttagcagactctcactttgtttcttttaatatgtaaattagagttccaagttcttgaaggtaagaaacacctgccactaaaaagaaggttaaaatgtcctcctgaagaaatgttgtatctggctgttattaaaaagcaaaaaattaatggatgatggcgagatcttggagaaaagggaatccttagacactactggcgagaatgcaaatcagttcagcccctgaggaaatccccagtttggagatttctcaaactaaaatagaattaccattccacccaggaatcccattactacgtatatacccaaaggaaaataaattgttctaccaaaaagacacctgcacttttatgtttatcacagcactcctcacaatagcaaagatatgaaatcaacccaggtacccatcaaaggtgaattagataaagaaaatatggcacatatacaacaaggaatactacacagccataaaaagaacaaaatcatgtcctttgcagcagcatggatgcagctggaggtcattaacctaagtgaattaacacaggaacagaaaatcaaatactgcatgttctcacttataagtgggagctaaacattgggtacgcatggacataaatatgggaataatagacactgaggacctagagccaggagagagggaaaagaagaagggttgaaaaactacctattgggtactttgttcactacttgggtgacgggatcattaaaagccctaacagcttcacacaatataacagtataacaaacctacatgtgtaataaatttaaaaattaaaaatttttaaatgccatatccttatgctgatttctgtgcacatatacatggctcttttgcctcatttaggtcaagaagatgttcctttttgaatacaaatctctctctaaaggatactttttaaccattctcactttatttttcaagccgaccttgcataatgaagtttttgttgctttgaaaataggagtagtaggccaggcgtgatggctcacacctgtaatctcagcactttgggaggctgaggtgggtggatcacctgaggttaagagttcgagaccagcctggccaacatgcaacatggtctctactaaaaatacaaaaattagctgggcgtggtggagggcacttgtaatcccagctactcaggaggctgaggcaggagaatggcttgaacctgggaggtggaggtctcagtgaaccaagatcacaccactgcactccagcttgggtgacagagtaagactctgtctcaaaaaaaaaaaaaaagaaaataggagtaatatttagtcttgtgtttttttccttgtaagaaagactttattctaaggaagaccatgcaatgcactgtccatgtcagcaaagagatgtttataccatagtgtttgaatagatgtgggcataaatactttaaaaaatataataaggtcactagaccctgggtgggctcgggatagaagacaaagttgtgaaagaggctctgagaacagggttggaactggataaaggtgtgcctgctttacagtttttcttgagttcatcatttaacataatgcctctgaaagtaacttactgctgtctttgatagaaatgcatattggtgtattgccagtgccacagctgggatgtctggactaacttggaaggttgcaaactgccacgtgcccaccttcagacctgtcttgactttctggcctttccccacactgaatgaatggagtgggagggaagagcctagacagaaacatatgttttctatttacttcttcctacctctttttttttttgttttttgagatggagtttcgcttttgtcacccaggctggagtgcaatggtgcaatcttggctcactgcaacctctgcctcccgggttcaagtgactctcctgccttagcctcctgagtagctgggattacaggcatgcaccaccacacccagctaatttttgtattattagtagagatggggtttcaccatgttggcctggctggtctcgaactcctgacctcaagtgatccacccgcctcggcttcccaaagtactggcgtgagccaccgtgcccggccttcctacctcttttcatacccaatgcttagaggttttcctttgagtcgtggatatgaagacctagaaagtatttgctaaaaaatatctccaagtaaatacagtctctgtacaatatttcttgaatttgtaaatttaaaaaccagagatgacaatttggcaaatacatggatagtttgaaagcttagtaagatccaagtttcatttatttttatttttttcttgtttccagtaggcttggaagggtccaaattttagacatgtatacaaaggcagtgaatgaattggaaagaagagggaagttaatacttttagcttttctcttttagagagattagctttccattattttaacagaatagcttaccaaaatgttcttttcctattttgtgatgaacataactgaaatcttgtatctaattaaattcaattcctacctaaaagttttcacaaaaaagattatagttcatgtttgtgactaaagaaacaaacagaagttgtttataaaatgtttggtggaaattttaatgtccttgttttcaccagtgaaattaatgatgacttgaaagtctttcttctttcttgaaagttttcttttctttgaaatgctatttgtttttctggttattggttacttgtggacagatagcagttgtgaagacataaactactgattgttaaaaatttcagcattctctttttaaaagaaatcagcaagccaattctaaaatttatatggaaatgcaaggacgtagaatagccaaaataatcttgaaaatgaacaaagtaggactcacttacctttgaaagttactctaaagctgttgtaatcaagactgtgttattggcaaaaggacagacatatagatcagtggggtccagttggatctgatccagtcagatccagttccaaatatagaactacacatatgtggtcaaatttgatgaggatgctgaagtgatttattgggaaaaagaaagtgtcttcaacatatggtgttcagaaaggtggttttccacatgcagaataaaaaagaactttgattcctaccttacaccacagacaaaaattaacttgagatgaatcaggacctaaacttaaaagctaaaaaattacaatttctaaaggacaacataaaaatatctttgcaatttatcttaggacacagagggcactaccattaaaaagttgataaattgtacttcatcaaaaataaaaacacctgctcatcagaagataacatcaagtagataagcctttgttacaattacatttgacaaaaggcttgtgtccagaatatacaaagaattattcaattatggaataattaaaagaaggcaatcaacatttttaaatgggcaaaagatttgaacagacatttcataaaataaggaatatcactggtcaaaaagcacatgaaaaagtgctcatgatcattagtcatcagggaaatgcaaagtgagataccactggctacccaccagaatggctaaaattagcaatattgatcataacaaatgttgggaggaatgtggaactgtcagtgattgctcgtgggggtataaaatagtacaactactctggaaaatgtttggcagcaattccacttctatgtatttatcccagataaatgaaaatatatacctacaaaagtcatatgtaagaatgttcatggccacttgattgagaatagccaaaaactgtaaaagcccagtgtgtatggtaggaaaaaaccaattttctcctactgtactctcaacacagagagtatagcgaccagatgtgtggatttttctcacactgaccaattctctgatgctagccggatagcctatattcaattcacttctgacactaactagagctcgtgcagatctctcatggattaagagctcagtctcacaagactgtgccctacttcatataccaattgcaagcagtaggttcccaggtcaccacaacttctgaccggtttggccacaagtgggaggttaccacaacccccttctcaggttcagtaatgtgctggagcgctcatagaactcagggaaacacttatatttatcagtttattataaaggatgttttaagggatacaggtgaatagccaaagaagtactctgggtaagatatgtaggaagcagcatggaccttccatgccctctctgggtgttccaccctcctgtcatctccatgtcttcagcatcccagatgctttctaaactctgtagtttagggatttttatggaggcttcatcatataggctgagcatttattaactcatttttcagccccctccttttcctggaggctggcatagtgtggctgaaagttccaggcttctaattatggcttggtctttctggtgaccagcccccatctaggagcccaccaagagtcacctcattagaacataagacattcttatcaatgcccaggaagttccaagggattagcaactctgttagaaactggggccacagaccaaatattagaacaaaagatgcacctagcatccctcttgctcaggaaattacaagagttttgagaactctctgcgaggaaccagggtcagggatcaaatacacatttcttattgtatcacaatatcacatccaggtgcccatcagcaagagcctagacaagcaatctggtatatccatacagtagaacactgctcggcaataaaaaagaacaaattgctgatacatgtaatggcaaggataaatctcagaagcattaaaggacatgaaagaagccagacacaaaatactttatactgtatgattccattgatataaagttatagaatagttaaaattaatctgtggtaacaaaaatcggatcagtagttgcttctggttgtggagggaggggaatgttgactgagaagaagcaagagggaattctacaggttgatagaaatgttctatcttctggtaggggtgtgggttatataggtatagtcacttacccaaactgatcaaactatagacttaagatatctgcatttcactatatttaaattataacctcaaattaaaaaatctcacacaaaaaatagcaaggtattttcctatctcttattctgactctctttcttattctcttaaagtattggacagcccagtcccactatactgaggcaacttttgaaagaaaataaaatttattacttttattatcttttaatgtatccactatactctatatagggcatcatttaaactctttttcagtctttgttgttgttgttgcagtgaagaagaaaagctatccagaagaacaaaatagcacagccgtgtaaacttgcaatgatttggcaagtttttgaagttatttaatcctgataagttaaaatcccttgaagcatatttatacattcatctttccaaacagctaccgcttatttgctctttcattcaagtgaaggttattgagcacctcctatgagtagatgttttatcagatactgagtaggcatgctacgatgagtacgcaaccaagtccctgcccttaacagcattcctagtttagaagtgataaatacaaaaataaattccattgcaacaagaaaggtacagcactgtacaaactgctgccgggcgttcttttgaggaagcaacgtcttctgccttgggtgcttgggaagattccacagaggaagtgacatttgagccagtttgtatgaatagttagagttgtggataggagttggaagaagggggacattttaagaagatgactagaaatgtaattgaatagtttagtgagtcttttatcctccttaaacctttaggtaaaggttctgttagtatctactgaaatagaagtcttttgcagtagcatagtcagtgtttaaactaggacaccaaatattttccattttttccctcaccaatagcagctaatatttattgagaacaaaggatgtgacaggtactctgcttaatgttttaatttaatttaatataatctccatagcaatttaatgcattaatattactgtccctatagattaggataattgaggattgaagtaatatcctttataaatggacaagctggggattctttcccaggtttctctgcttccaaagcctgggatctttaaaaagcctactctgtgtgtgttgctcttagtatgagcccagagaaagcaagccaagggcaactctgaagtgtcttgtggtcacttaaaagaggggggatttacctgttttccaaaatatgacctgcccaccttttgtatttaagtttcagttcattgccaatatgtataattatttataaactcaaaataatctgttttatttttatttctatctacatgatactttaatttcatgtatgaaaaactgccaagtaatcattctctaagctttctacagtatccattttataagttaaagaatcatagcagtaaaaactttatagccatttcactctaattattagagtgagaacctcgaagattttgccctttgaaaatgacttgttatttgggcaatctggcttctcactatttaacaagtgttgcttaaagtatcatgtaggaacatttgatgtgctccacagccactcacagcttctgataattctatttgtgacagccttgagagatcacccggtggtagtttaagattgtgctccaatataaaagtggcaaggtttgtcttttaaacaaacatgtatttttttcagagtagaagataaatttttgactaaatcagtcatttgccatactctaaaattcgttttagaaacttggttttaggtttgtagtttttgcccaaatgaccacttaacatgggacacccaccctaacccctacctctttcccaggaaagttagatttttgtccaagattccaccagtattgaatatttgctcttgccagatatcttgtcaaaggtacattgtctgcttttggttgaccaacggggtatgggttgttatgccagatgagtgtcacctagtagtggaattagaaaatcatcaaccaagggcccggcatagtggctcacatctgcaatcccagggctttaggaagccaaggtgggaggattgcttgagcccaggagtttgataccagcctgggcaacattgcaagaccttgtctggtgacacacacctgtagtcctagtcacccaggaggctgaggtgggaagatcacttgagcccaggagttctatgagctgctctagcacattactgaacctgagaagggggttgtggtaacctcccacttgtggccaaactggtcagaagttgtggtgacctgggaacctactgcttgcaattggtatatgaagtagggcacagtctggtgtgactgagctcttaatccatgagagatctgcacgagctctagttagtgtcagaagtgaattgaatatagcccacattctttccataataccacacttccttagtaataagaaataacaagatatttaaaaataataacttccatttaaatctttttaggacataacttctctctttcagactccgttttaaatgacacttcattttgtggtccaaaatcagaagtaatctcttcttcctacatatttcaatagcattttacctatacttatacctagacctctctagaagatttatcttcataacatatttgatttttatagcactttacttcttttatgacacattatcatgctattttctattaatcacgcattcacataggtgattagttcctccaggaccataaactccttgaggtaagatctgtctattggatctttgcacccacctcagtaccagcatgcatgaagaaaaaaatgtgaagtactccttggtctactatagcattaggaaggctatcaacccattattctgctccattaaatgttttccaatgcctgatggttagtgactttttaaatttagtttttaattttttttagagtcagaatattgctctgttgccctgactgcaatgccacgatcatagctcactgcctcaggctcctgagtagctgagacgacaggtgcatgccaccacacacagctaatatttaatttttttgtagagatgggttttggaatcagacttgtctgtacatgtctaccatttaataactgtcgtacatcacattgcttcattctttgaacttcagttttctcaagtgtagcatcatagaggagttgtgattatctaaatgattaaatgggattacacttttaaaagctgctacaaaatgcctggcacttggtcacttttcattatatgctggttccttttgttctcctgtctgacccaattcaaagtcccttctgtcccattagcttgttttatgaacatggaggcaaggattctgggtaggaggcagttgtagtacttcattcattaagcatttgctgactactttgtatagtggaaatctagaggaagggattattattattattattattattattattattattattatattttgagactgggtctcactatgttgcccaggctgaagtacagtggcacaatcatggctcacggcagcctcaaccccccagcccaagtgataattctgcctcaggctcctgagtagctgagacgacaggtgcatgccaccacacccagctaatatttaatttttttgtagagatgggtctcactgtgttgcccaggctggtcttgaactcctgggctcaagcgatcctcttgtctaagcctcctgaagtgctgggattacaggcatgagccactgcacctggcctaggattaactattttaataggcatttaggaagtagaatgggtagatatgggaattcagggagaattaggggaaggtggatagaaaagaggctaaactgattttcttctataatctttggaatcaaacgaagaagggcaaatcgattattcttctcaggaaaagattttctttatctttaaacgtataggtaaattagctgtcttctacctgataaatttgttttctgtaagttttgtaccttttttaaaaaaagaaattatttgtatcattaaggacttaaataatatacatggcatgaatgtacatctgcccatgaatgctgaatttattctagaaaatattgctttgcactctttgattctagcttgtgttgctgacctcactagtataattattggctgactttgtctctttttccatttcctcccaatcagtttgataaaggttactcttagaacatccgtcacagctttggaaaggaaggcaagaggacagactatacacctttcagttgcctgaagattattctatccaatccaccaagccaaggggattatcatggtaagtgcctccactggatatgttggccaagtacagaaatccaagagctctgttggaaacactgaaacaatgttgtggctttttgcattcctgtcaagacctagtttgtagcttatgtcagtcgtcactgtcaagctagagctccattactcttagaacaatttgtcttattactgaactaggtcaggcaagagaaattcattcagctgcacttcagtttgtgctggattaggcttttcagttctcactttcttccttcccgctgttctctgtctccctcatcttctgcagtgttctgcgagtgtcttagagggcgatgtaagttttacaaagctttttgaaattagaatgttctaagtttggaatagtagattcattaattttccaaaggctaactactaaggaaaagtgtgaggtttttttcttatcaccatcatctgattaaccaacaaagattaagtgggcaatttaacatgtcgtgatatctgccataactatcagttttcctgagttatttaaaaagaaaaacaaaacatctcatttgtctggtacgtccaagaatgaattaatagtttatatcagtaaattttctggattatcaaagcttactacagtatgtgtcaaaacttatttttgttttagaatcttcaacactttttaaaagactgcacacttttggactgctaaagatcaaataatcataaacaatatttttagaaagacattctatgtgaccaaatcactaaaaaatgcccatacattcattagttaatagatgaagaagtggccagcactcgttatatagatagacagataagatagatctatatatagacatagattttttttttttgagacagagtttcattcttgttgcccaggctggagtgcaatggcgtgatctcggctcactgcaggtctccacctcctgggttcaagcaattctcctgcctcagcctcctgtgtagctaggattacaggcacctgccaccctgcccggctaattttttgtatttttagtagagacgaggtttcgcctagttggccaggctggcgggcctcaggtgatctgctcaccttggcctccaaaagtgctaggattacaggcctgagccaccacacccagcctggtaatagatattgagtggtttttatcacttatttcagagtcccttgaggtgcttttttagaaatgcagattctcagagtgcaccctcagtcatataaaatcagactttatttgcaagtacactgggtgagttttatgtcttctaaagtttgaaaaccatggggccaggtacttctgttggggaagcctgaagccttttttagcctagcagccataccaggcagtcaacttatgattaagcttgtggccaagtaaaactcccagggatttgtctgcaaatttccaggttctagcatttgtctcttaattagttggttttcattagcttaaatgcaaaactttatttctcttaagttgtatcttgttatcccagtgctttatgttattattttgtttctaagttcaactctgtcagtcaagaaatattatacttagcactcaatgaactcattatttgttggaaacatttacttattccatttttaaaaagtaataaacttaattttttagagctgttttaggttcacagcaaaatcgtgtgggaagttcagagttcccatgtacctccacgccccaacacatgcacaacctccattgctgtcagtattccacaccacactggtacatgtgttacaattgatgaaactacattgacaaattcttatcatccaaagcccatagtttacaagagttcattgtgtatttcgcataacagtactttatcagatttgtcttttgcaaatgttttctccccatctgtgcttctgttcttttctctcttttttcaccttttgggatttcatttacacgttataccttttatagttgtcccatagttcttaggtattgtgttttgttttgttttgtttttgtcttttttctctttgctttttagtttcagaagtttctatttgttatatccacaagatccaaggattttccccagtcatgtccagtctattgatgaacccattgaagacattcttcatttctgttacagtgtttttgatcgctagcatttcttttttgttcttagaattttcatgtctctgctagctggttattccaacacatttattgaatagggagtcctttctccattgcctatttttattgactttgttgaaggtcagatagttgtaggtatgctggcttatttctgattctctattctgtttcattagtctatgtgtcggtttttgtaccagtaccatactgttttggttacaatagccttatagtatagtttggagttaggtagagtgatgcctctggctttgttccttttgcttaggattgctttggtcatttaggctcttttttagttccatatgaattttagaatagttgttttcttattctgtgaaaaatgacattggtagtttgatagaaatagcattgaatctgtacattacttagggtggtatggccattttaatgacattgattcttccaatccatgagcatggaatgttttcctgtttgtgttgtctctgatttctttcagcagcgttttgtagttcttcttgtagagatctttcacttccttgcttagatgtattcctaaatattttatttatttaatttttggtggctactctaaagagaattgtgtttttgatttggctctcagcttgaacattgttggtatgtagaaatgctactgatttttaaggctggttgtggtggatcatgcctgtaatcccagcactttgggaggccaacacgggtagatcacttgaggtcaggagttcaagaccagcctggccaacatggtgaaacctcatttctactaaaattaaaaagcaaaacaaaaattagccaggcgtggtggcgtgcacctgtaattccagctattcaggaggcggaggttgcagttggctgagatggcaccactgcaccaggtgacagagtgagactctgtctcaaaaaaagaaatgctactgatttttgtatatcaattttgtatcctgaaactttgctaaagtcattgattaattccaggagactttttggtgcattctttagggttttctaggtatagaatcatatcatcagcaaagaaagatagtttgacttcttttcctatttggatggcttttatttctttcttttgcctgattgctctgggtaagactcccagtagtattttgagtaagagtggtgagagtgggcatccttgtcttgttcccattctcaaggggaatggtttgagctttggctcattcagtatgatgttggctgtgggtttctcttagatagttcttattattttgaggtatattcctttggtatctagttttgtgagggtttttgtcatgaaggaatattggatttttttttttttttgagacggagtctcactctgtttcccaggctggaacgcagtggtgcgatctgggctcactgcaagctccgcctcctgggttcatgccgttctcctgcctcagcctcctgagtagctgggactacaggtgcctgccgccatgcccagctaattttttgtatttttagtagagacggggtttcaccgtgttagccaggatgatcttgatctccttacctcgtgatccgcccgcctcggctttccaaagtgctgggattacaggcgtgagccaccgcgcttggccaggatattggattttattgaaagctttttctattgagataatatgatttttgtttttaattctgtttatgtggtgaatcacttttattgatttgcataagttgagtcagatttgcatcccagaaataaagcctatttgatcatggtgaattagctttttgatgtgctgctggattcagtttgctagtattttgttgaggattttgattctatggtcatcagagatattggccagaagttttctttttttcattgtgtcttggccagattttggtattagggtgatgctggcttcataaattgagttaatggggggagtcccccctcctcagttttttggaatagttttggtaggattggtaccaattcttctttgtacatctggtagaatctggctatgagtctacctggtccagggctttttctggttgttaggtttttttattccagattcaatttcagaccttattattggtctgttcagattttcactttcttcctgcttcagtctcagaaggttgtgtgtttcgtggaacttagtcatttcctctagattttctaatttgtgaaaaatgcacaattattaacttacaaatctatcatctgtatgactgaaaaaaaagacttttctatattaaatttttaataagcattttgacttaccattgcagtttattaaaatatctaaaattttctagatttttgtcctaaaacagcttttgtatttcaaattcttctgtattcttatttatgtgaatatttctagtggtctttcatttttttcatgaaataatatagagatgacacacatccaccataagttgtttttctatgaaatagtttattttttcatctcatttccatccatgattcttttactttttcatagattctacgctttaggaaataggcatataatttacatttgaaaatgatgttgaatttttttctttctcagagtttgcatgtttttcattttgtttatctatcttccttctctcatatgccttttatataatttttagactagaatataagaagattgtataaagttttaaaataaactattatgcagctattttgtgattatttgtgcttgttagcaaggagagtaattaaagctgttttccctcttcttgtggaatggacatcttagcctgagaatgctgcaatgttttatgtaactcttgagcctggagtgccctgataaccatacagctaagtaatcatttagataaaaagaggaatgcagttgcacccatgggcaattacctttttttattaataagccgttagacaattaaggggagcttagatggtctctcgagtgtggtattgtactaagttgtgagtaaataaccttgtttgtgtgctggcttattttttgttgtcagggtgcccattccgtcacagtgatccagagctgctgaagcaaaagttgcagtcatacaagatctctcctggagggataagccaggtaggtcatattcttctctctgcatctgcagtaatgaggccttagacagatctctcggttttatttaatgttcttgcagtgatgctgtgtattacttgtcaggcctcacaccagacatcttatcttcaagatgaattaagttaaaaccttgacttatctggtttagactcttgggaaattctagttcttctgtctgctaagctgcatttttatttttcctagtcataaaggaagctggaaagcttcccccacacctcagtttgttttactatctcaattgaggactacatctttaaaaataaaatttttgagcaatgcatggaagcttattaatgaagctgaaaattaatgacagcatatttcattttgggaaattgttttctgagcagatgataatgtagtacacactggctgaatgttctgataggcatcagttattgctgtgtttaatctacacttctgatggcagatcaaagagtttgtcaaaatactttgtcttatgaacaatggaaatgctcagattgtaaaaccaaatgttaaacagtacattttttagtaagtctacctttaaaaaattaatattgtgacatagcaaagactattttctatagtgtgctttcaagttgactggaattttgaaggaataggggaagagctgctgcttccttagcttaagaagaacattatatattttagagttagaacatctaaatcatcatacatctttaaattgttatttttatttaaagaaaattgttactctagacaactttatggctgcttctgtgtccaaagttcagataacaaatcttacatagttttttagtactttgagcaaagcagtgttcaaggtgccatagagtatgcaaggaagaatcagatataaatcctgctcccgcaaaaccagtgtctgaaaataaaaacataaaccaagtgtcatgagaggtacacatagactgtcttgggtcttctgatgagggaaagactataaccagctgaagaggtcaaggaaccctttatggaagagatgccctttgaattaggccttgcatgaaggttgggaattagggagagagaatgcacaaatgaaagactataggagtgttaagatttcaagcttaggataatggtggcaccaatacataaatactaataggtaacttaaaggaagtatagttggtttcagtttgagtgacttaattttagtggttataaactgctgctaacatatttgataaggaatctagaaataaagaattactggctttttttttaagcagtcataaaggatcccctttttgaaaacaatacaagttcttaacgtatctatgttaacatattatgtctgcatttaaatggtattaatgtggatttagggcattagataatttaagactagaaatctgatggtcttttcagttagaattgtagcataggtagaaagccattctcttttttggagtcctaggatgtgacatgccatggtgcataggtaggaagtcagtggtagaaccaaaaattgaagccatgctttctgactcctaagattttttttttttcccctgaactccactctactttagagcttattataatgagtttgctggagagagagaagaggtagggagtcaaaagctgttttatgaaaatgtaatcttggctaatccttctctttgtcaagcattaaaaggaggtgggatcaatgaagactgaacagaaatggggagagagggagaaaatacattaaggtagtgaagtatcacaaaagtcaaggaaaaaattttgagaagagaataagttccacagagtcccttgtagcagagatttcttttcatggaggaactaagaaaaggtggttggatatgctgagaggattatttgactttgactttggtgaggtgtcagtaaaatggtggaaaccaaaagcaagattatacttgcttaaaaaattaatgaaagacagtaaataaccttttcaaaaaatgtgtcaggccaggtgcagtggcttgtacctgtaatgctagcacttagtagggaggctgaggcaggcagactgctgagcccaggcattcaagaccagcctgagcaacatggcaaaaacctgtctctacaaaaaattagcaggtgtggtggcattcaactgtagccttagctactcaggaggcagaggtggaagaatcacctgagcccaagaagttgagcctccagggagccgtgatcatgccactgcactccagcattggcaatggattgagaccctgtctcaagaaaaaaaaaaaaaaaaagtgccagtaaaggggatgctagagtggtattagcttaagcatcataggattgttcatttctgggtttaagacctgagcctatctgtagaaagaggaggagaagaaagaactgtcagagagggtgggcttgatgaagatataaaagaaagaaaataactctctaaccaagtagaattaagttctctttcctttataccatgactggattgcacatgcctttgctcttaacatttgttacacttgattgtaattatttgtttacctgttcatctttcccaatagtttgtgagtttcctgaaaggaggactggatttttacttaactttctatctcatggtaatctaatgagttacacttgttaggtgctttaaaaatgttggaagagtgaatgggcatatttaggtatgaggtggatcctagagtatgcatggtggtatgcagagagaggcaaataggaactcaaagacacaagtgaaaaagtaacttattggaggaaggacgatatgcacttgaaccaaagaatggtgacagagaaaggcatacccctcagcaatgtgggaacatagaggaaatagttaagacacagcaaagggaagttgatggagtatatcaactggtcttactcttccttgtaagtaaagtaaggtcatcagctggagagtaaaggggttatgaatgatattctggttatagaaaaggttagaaactaccaccaacaaatgtgatagggaatctagaagaaattagaagcgttttttagcagtcataaagaatcacctttaaaaaaataatcttaatatactaacattatctcaagaaaattaatgtttatagttaatagtaatgaccatgtttgtatactctttgcttttgactccactgtatttctccatttgcccttgatccataagtatactccttacttagctgaagctggttagtaattttcacattaccctttagacctgcattgtaaccttttatctgagatgaacacagatgtatagtgcatgccagcaagctgtaaataatatcttgcttttatttgatgtctttattgagtagatctcactagagtgaagcagctggtggactgtattctaaagggcagagagttaatgaatgaaaattccatgtaaaacattttgataaggttgaattttgtaggttggcctaagtgcagattagatcttgaaaactccaagcgtacattaaaatattgaatgagagttaagaaaaacatcattaaaatgtacgtaaggtagaactccatgtggttatttttatctcagagaaaactacttgaaaaagataccttcaactataggaaatagattttttttttaatttttggagacagagtcttgctctgtcttccaggctggagtgcaatggtgcaatctcggctcactgcaacctccacctcctgggttcaagcgattctcccgcctcagcatcccaagtagctgggattacaggcaccctccatcatgtccagctaatttttgtatttttgtagagatggggtttcaccatgttggccaggccagtcttaaactcctgaccttgggtgatccgcctgcctcggcctcccactgtgctgggattacaggcgtgagccaccactcctggccaagaaatagatgttttaagtaatcaaaatgttggtgatcagaaaagagatcattgtgactcagctggtgttgctgattttttttataaagcatacttacaggatcacatttcattttcctttttaattaaccttaatagtgttacaaaatcactgaaaattaatgagcttggtatccagcttaagaaacagcaactaaacaacagaatatggccaaagaaaatggatacccctgcatttattctcctttcctccccgaaaagagaaatacacagcagtcaattcaccaacacgatataaaaattgtaaatatttatgccccaaaaacatagcttcaaaatacatgaattaataatagagaactgaaaagacaacgagacaaatccacagttatgtttggagacttcagcactcctcttaataattaacagaagaagcaggcagaaagtcaggaggatatagaagccttgaacaatactgtcaaccaactttacctaattaacatctgtagaacatgttacccaacaacaggagacatgaaatagtaaaccaggtagatcatagtctaggtctttaaaatccattacaaatgtaaataatttgaaatcctataaagtaggatttaaagcagagcaataaagcaagaaaaacaaaagattagaaaagaagaaagaaaacctttttctattctcaaagtgattatcaatgtaaaaaatctcaaagaacctagcaagatgctactgtaactagtaggtggaaggatactaactcaatatacaaaaatcaattctatttcttacagtgaacaattggaaattaaacatttcaaaaagtattagtttgctgcaaacataattgtggcttttactgcaaatacttttgtagcaacctaataccatatacagcagtaccagaaatccaaaatatacataagatctttatatgaaagactgatgaaaatgaaaaacaaagtggagacacattttcctgatttcaaaacttactgaaaactattgtaattaagatggtgtggtattagggaaatgatgaagacagattaattggacagaatagagttcagaaatagacccacatatatatgggcaactgatttttaaacaaaggtgccagggcaatttaataaggaaatggtaatgtagagttccagaacaactccagagttctagaacaagtagatctagaacaattggatatccaaatgcaaaaatcccagacatatacctccaagcttatataaaaattattttaaaatggattatagaactaagtaactgtaaaatgtgaaacttacaaaagaaaacagaatatctgcacgaccttgggtttggtgtgttccctgaaagaaaacagtgataaattagactttaccaaaattaaaaattttgctctgtaaaagacagctttaagagaacaagataagccacagactggaagaaaatatttgcaaatcataaatttcataaaagatgtgaatccaaaagatataaagaactctcaaaactcagtaattagaaaacagttttttaaacgggcaaaacatttgagtagacagttcaccaaagaaaaagtgtgaatggtaaatataagcacatgaaaaaatatagctcattagtgaaatgaaatttaaaactacaatgaataccatgatatgccaaatagaattggtctaatttaaaaaaatctagcaatactaagtgctagtgaggatgcagagtgactgaaggtctcatacaatagtggaggaaatgcaagtcatagagtcactttgaaaaggagtgtgaatggcaatcattaaaaagtcaggaaacaacaggtgctggagaggatgtggagaaataggaacacttttacactgttggtgggactgtaaactagttcaaccattgtggaagtcagtgtggcgattcctcagggatctagaactagaaataccatttgacccagccatcccattactgggtatatacccaaatgactataaatcatgctgctataaagacacatgcacacgtatgtttattgcggcattattcacaatagcaaagacttggaaccaacccaaatgtccaacaatgatagactggattaagaaaatgtggcacatatacaccatggaatactatgcagccataaaaaatgatgagttcatgtcctttgtagggacatggatgaaattggaaaccatcattctcagtaaactatcgcaagaacaaaaaaccaaacaccgcatattctcactcataggtgggaattgaacaatgagatcacatggacacaggaaggggaacatcacactctggggactgtggtggggaggggggaggggggagggatagcattgggagatatacctaatgctagatgatgagttagtgggtgcagcacaccagcatggcacatgtatacatatgtaactaacctgcacaatgtgcacatgtaccctaaaacttaaagtataatttaaaaaaaaaaaaaaaaaggagtgtggcaatttcttataaagtgaagcttacacatgctatgtgacacagtgatacctgtaactagtatttatagaattgaaataaaagcataagtccacataaaaatctgttcctaagtgtttatagtgtaggcattattcataattgccaaaaactagaaacaacccagatgttcttcagtgtgtgattggataaacaaattgtggtatagtcatacaatggaatattacctgacaatagaaaggaataaattactggtatacccattaaaatgtaaggttctcaaatacattataccaagtgaaagaagtcagactcaaaagcactatagtgtataattctatttgtatgataaatctgtaggtacagagtgattgctgggagcaggagaggtgttataaaggacaagggaaatatttttgggtaatgggaatgatctgtgttgattgcagggtaatatgaaaactgaatttgtcaaatgttgcagaactatgataaaaggaaatatattttatttaaaaacttttacttttttagaaaaaacttagtccctgagtaaaaaggggatatattttactgtgtggaaattataccttaatttttttcttttttttctttttgcttttttttttttttttttaaatagacagggtcttgctctgtcacacaggctggagtgcagtagtgtgatcatatctcattgcaacctcgaactcctgggcctaagtgatcctcttgcctcagtctcctaagtagctggggttacaggtgcacatcaccatgcccagctaattttttacttttttgtagagatagaggtcttgctgtgttgcctaggctggtcttgaactcatggctcaaggagtcctgtcaccttggcctcccaaagtgctgagattatagacatgaaccacttaatttcttttttttaatggggggagaaagaaagggtagatggtaagtagcataatgagccaaaatatttacttttcatagtaaaaatgcagtggattaagtttatatcaggaacttaaagtataaacatataacttagagtgacatagacaacatcctatgtaacaaaaaaatggaaatggttaaagtaattgcctcttgggaactaaccaagtagtgggaagaaatgtgatatgagaactgttgattttaataataagccataatgtacttcagtttttttcctcacatacattactttgattaaaagttagaaagaaagtataatgttattaatgaagtttaagttaaatggtcgtgtgcctaatggatagatggtaatagcagtagtactagatgactgcaaggtctttgggtatgaaattctaacccttatccctctgagctcccagtacctagcatagtatctgatccatgttaggaactgtgaaggatctgagattttaccctacttgcaagctaagaacttagctgccacacttttatggattctggcagaagacatgacaattccagcaatagcagtatgccagccttttcttgcattcgttccttgagccctacttcccacagagcaacatgagggccaggtactacctgcacatgcagtggcttgtgttggaggagggaaacgctgaatttagggaatctgaaccttttattatggacagtaagtatgtctactctttctttatttttaattaattaattaattttttgagacagagtttcactcttgtcacccagactagagtgcaatggcgcgatctctgctcactgcaacctctgcctcctgggttcaagcaattctcctgccatatgtctgctctttaatccagtggaaggaaccattgtcttccagggctgttcattatatcagaggtccccaacccctgggccacggactggtacttgttcatggcctgttaggaacagcaggaggtgagccagggcaagcaagcattactgcctgagctccacctcctgtcagatcagtggccatgttacatggtactggtccatggcctgttaggaacagcaggaggtgagccagagcaagcaagcattactgcctgagccccacctcctgtcagatcagtggccatgttagattctcataggagctcgaaccctattgtgaactgtgcatgcgagggatctaggttgtgcgctccttatgagaatcgaactaataatgtctgatgatctgaggtggaacagtttcatcctgaaaccacctctccaccctggcccatggaaaaattgtcttctacgaaactggtccctggttccaaaaaggttggagaccattgtgttacatgaacatctttgaaaaaatggtctgaagtaaaagccgttgttgcctctatttgcaaaatgttcagaaatttaagactattggaaaattatttctcaggaatacatagctgatgaccagtgaataatatatagatatacaatctatattggtcatttcttattggcacctcagctttttctccttaaaatattggtgtacgttggctgggtgtggtggctcacacctataatcccagcactttgggaggccgaggcaggcggatcacaagatcaggatatcgagaccatcctggctaacacgatgaaaccgcgtctctactaataatacaaaaaattagccgggcgtgctagcgggctcctgtagtcccagctacttgggaggctgaggcaggagaatggtgtgaacctgggaggtggagcttgcagtgagcagagatcatgccactgcactccagcctgggcaacagagcgagactctgtctcaaatatatatatatatatatatatatatatatatatatatatatatatatgtgtgtgtgtgtgtgtgtgtgtgtgtgtgtgtgtgtgtacattttaatctcaatactttcattaatttcttttcaaaattggcagtgagttaaaaaatcctttcaatattttgttagtttgggtatcttatctatctatcaatagtttctgccttagttagatgtctgaagtttctaattattctaaaaacacttttgtttttgttttttagcttttattttccacttcagcttttcctttaaaaacctgcaattttatgatagaaatatttatattttgagatacagaaattttagagctgggtgcggtggctcatgcctgaatcccagcattttgggaagccaagacctatgggttgcttgagcccacgagttcgagaccagcctgggtaacttggcaaaacccagtctctacaaaaaaatacaaaaattagccaggcgtggacgcatgcacctgtagtgtcagctatgcaggaggctgaggtgggaggattgctggattgcttgaggccatggggactgagtgagccatgatcatgccgctgcactccagcctgggccacagagtgagaccctgtctccaaaaaaaaaaaaaaaaaaaaaaaaaattgagaatatgtgttcaaaatattgacagtaaaatctctcattggcctgaaatggtttgtttctcagaagaagttttttctattgtggaaagatgcacatgaaattttcaagttgtactttgtttcatgggcttataatggtgtgctatgtcctattttaatagaaaaattggggctggccacagtggctcatgcctgtaatcccagcactttggaaggccgaggtgagaggattgcttgaagccaggagttggagaccaccctgggcaacataggtagaccctgcctttaaaatagtaataaaaataacagttgtggtggtgcacacctgtagttctagctgtttgggaggctgaagcaggaagctcgcttgagcctagtaattgttacagtgagctataattgtgccactgtactccatcctggaagacacagcaagactccatctctccaaaaattaacaaacaataaatatataaagtttataggaaaattgtctttttgttatactgaatcacttgtggcatatctttaattctcacagagcttaataaataaacaataattgctgcctacagactaatctaaaagtggtagttcattgtaatatatgccacaatgaaggtaacatcttttattgtaatctctgaatgctattactccttaatagtttttctttcttattatgtagtaatcaggggtgtgcttgatctgtctctggaaatagaacaatttgaatccacggtagtttgttttatttttggcctgcttatgcaaagcattgtgatggaggctttacacaaataaactgtatctcatttgattcccaccactacattatccctattttatagatgagaaagctgaggtttggagaaggcaagaaactgctcagaaccatagaactaatatatgataaggccagaattcgcacctatgcctgacagtgaagctgaagtttcttacaatacattgttctgattctctgtagtatttttctattttaaatccagttgaaattctttttggtttcttctttcatggaaagccatcactgtgaagtgaatggtaattcttatgtacctaaacttaagaaaatgtataatgcattgttgaaacactgacaaatgtgaaacaaagatgagaataattcagaaaatgtaaattatatatggtaacagattttcaaaagatctgattgctttttttattgaggtgaaagtcacataacatacaaataactattttaaaatgtacaattcagtgcatttagtacattcacaatattttacaactactatttctatcaagttccaaaacttttcatcacccccaaagaaaaccttacacctattaaacaatcacctcctgccgcccctagaaaccaataatctgctttctatctctatggatttacctattctgaatatttcataaaatagcatcatacactgtctggcttacttcatatagcatgtttacaaggttcatttgtgttttgttcttttgaatggccgaatgatactccattgtatgtctgtaccacattttgttcatccattcgtcctttgatggacactaggttgtttccaccaactgggtaactttaaaaatttatctcacggttttggaagccagcagttaaggtgttggcaggttagttccttctgagagctgtgagggagaatctgttcccacattttccccagattctggtggtttgttggcaatctttgacttgtagatgcatcactccaaactctatctttatttgcacatggcttcctccctgtatgtcttctcaccatctttgctctgtgcattctttgtctagtttcctctttttaggaggacaccagtaatattggattagggcttaccttaatgacctcattttgattacctctgtaaataccctatttccaaataagatcacatttttcggtagtgggagttaggacttcaacatatctttatttgagggacacaattcatttcataacaccatccttttaagtatgcagtgatatctcattgtggttttgatttgcatttttctaatgaataatgatgttgagcatctttttatatgctttttggccatttgtacatcttctttgaagaaatgtctatccaattcctttgtctatttttgaattgggtcgtctttttgttgagtttaagagttcttaatatagtttggatacaagactcttatcagatagatatatgatttgcaaatatgttctcctattctgtaggttttcttgtcaacaacttcttaatgtctattggtggacaaaagattttaattttgatgaagtttgttttcttttgttacttgtgcttttagtgtcataattatctatagtcaaattcaaggttgtgaatattgacatctatggctttgtataaaagtattatagctctagcttttatatttaggtgattgatcccttttgagttaatttttgtagatggtatgatgtaggggtttatcttcattcttttgcttgtgaatatccagttttctaacactatttcttgaagagacaatttccccattgatggtcttgcacccttgtcaaaactcaattggacatagatgtatgggataatttctggaatctcaatttctactgtattggtctatatgtctgtccgtatgccagccagtaccacactgttttgatttctgtaccttgtattgagttttgaaatcaggaagcatggaatcttccaattttgttctttttcaatattattttggctatctggagctccttgcaattccatatgaatttgaggatcaacttttttatttctgcaaaaacagccattagaactttaatacagattgcattgaatctgtagattgtgtataaagagggatcatggcagatgggaggcaggactagattgcagctcctgacagaggagcatgtggaggcttaaattgtgaattttagctccagatcgactgcaagaacaaaccagcaatcctgagaggaccctcagactctctgaaggaagcggactgcttctgcaggacccgggagacaccccaaatactctgggaggtgaaagcctctggcaagttttcaagcccgccttccacctggaaacagatctggggctgttgtggggggcatggtaggagtgagaccagcccttcagtttgcatgggaggtgggtgaggcctgtgactgctggctttcccccacttccttgacaacctgcatgactcagcagaggcagccataatcctcctaggtgcacagctccagtgacctgggactctcaccccatcccccacagcagccgcagcaagacccacccaaggagagtctgagctcagacacgcctagccccgcccccacctgacagtccttccctacccactcaggtagcagaagacaaaggacatataatcttgggaattctagggccccactcactgctgatccctctgcactgctactgctgatgctctctggaaagcgccacatcttggcaggaggccaaccagcacaaaaatagagcattaaatcaccaaaactaagaaccctcatggagttcattgcaccttctgccgcctccaatggaacaggcactggtatccgtggttgagagacccatagatggttcatatcacaggactgagcagaaacccccagtactagcatggtgccaggtagactcactggatggttaaacccagaagagagacaacaatcattgcagttcgcctcacagaaagccacaaccacaggaaaaggggagagtactacatcaagggaacaccctgtgcgctagaatttgaacaacagcattcagccctagaccttccctctgacagagcctacccaaatgtgatggaaccagaaaaccacccctggtaatatgaccaaacaaggctcatcaacaccccctaaaaatcatactagttcaccagcaatcgatccaaatcaagaagaaatccctgatataactgaaaaggaattcagtaggttagttattaagctaatcagggagaaccagggaaaggcaaagcccaatgcaaggaaattcaaaaagtgacacaggaagtgaagagagaaagattcaatgaaatagatagctaaaagaaaaaacaatacaaaattcaggaaacttgggatacacttttagaaatgcaaaatgctctggaaagtctcagcaatagaattgaacaagtagaagaaagaaattcagagcttgaagacaaggtgttcgaattaacccaatccaacaaagacaaagaaaaaagaataagaaaatataaacaaagcctctaagaagtttgggattatgttaaacccaaacctaagaataattggtattcctgaggaagaagacaattctaaaagcttggaaaacatatttgggggaataattgaggaaaacttccccagccttgctagagacctagacatgcaaatataagaagcacagggccaggtgaggtggctcacacctgtaatcccagcactttgggagcctgaggcaggtggatcatgaagtcaggagatcaagaccattctggctaacacagtgaaaccccatctctactaaaaatgcaaaaaattagctgggcgtggtggcacacacctgtagtcccagctacttgggaggctgaggcaggagaatcgcttgaacctgggaggctgaggttgcagtgagccaagatcatgccactgcactccaacttgggtgacagagtgagactccatctcaaaaaaaagacaaagaacacccaagaaattcattacaaaaagatcttcgcctaggcacattgtcatcaggttatccaaagttaagataaaggaacgaatcttaagagctgtgagacagaagcaccaggtaacctataaaggaaaacctaacagattaacaacagatttctcagcagaaaccctacaagctagaagggattagggccctatctacagcctcctcaaacaaaacaaacatcagccaataattttgtatccagtgaaactaagcaccacatatgaaggaaagataacagtcattttcagacaaacaaatgctgagagaattcgccattactaagccaccactagaagaactgctaaaaggagctctaaatcttcaaacagatccaggaaacacatcaaaacagaatatctttaaagcataaatctcacaggacctgtaaaataaaaatacaagttaaaaaacaaaaacaaaaaaccaaagtacgcaggcaaccaagagcatgatgaatgcaaaggtacctcacatttcaatactaacattgaatgtaaataggctaaatgctccacctaaaaggtacagaactgcagaatgcataagaactcatcaaccaacaatctgctgccttcaggagactaacctaactcataaggactcacataaacttaaagtaaaggtgtggaaaaaggcatttcatgcaaatggacactgaaagcaggcaggggtagctgttcttatatcagatgaaacaaactttaaagcaacagcattacaggcaggagctgccatgccaggcattttgctcattgctttcaatgatgtcatgtcttttttgtccctcggtttctccattagtaccttcttttgcattaattttttttttggtagtgtacttagtcagttttgtgctgctataacaggatatacagatcagctaatttataaatgaaagaaatttatttctcacagttatagaggctgagaagtccgaggttgaggagcctatctctgatctgatgaagactttcttgttcagtcttcacattgcagaaggacaagagaacaagctagccaaatgccacctgaagctgctgctgctttttttctttataagggccttagttctattaatgaggaatgagccctgatggcctcatcatgtcttaaaggttccacctcttaatactagcagatttgcagcacctgaactttggaggggacacattcagaccacagtaccatagtaccatttttattcccatcactttttttttgatgtatttttttctcattatttgcttagtggttatcctggggactgtaaccttttatatgtataacaatttttaatatcaacttagcatctattatatacaaaaactccacttctgtatagctctgtccctcccccttatattgttgtcacaaattacatcttcatacattgtgtgcccattaacttataattactgttttatgcatctgtcttttaaatcatttgagaaaaaagaagagttacaaatcaaaaacacaataatactggatttttaatacctatatagttaccttagctcgtgttcattctttttgaatggctttgagttactttgtagtgatcttttctttctgcctgaaggatttactctagcatttcttgttgggcaggtctactaacaacagactccctcagcatttgtttatctgggaatgtcttactttttccttatgaatcttggttgacagttttttttttctttctttcttttttgagatggagtctcactctgtcgcccaggctggagtgcagtggcacgatctcggctcactgaaacctctgcctcccgggttcaagcaattttcctgcctaagcctcccaagtagctgggattacagccagtttgtgttagctccagtataccactggctgtagtaaaatgtacaccaagtttcacagagtaataatagtatcgaaaaaaagcattacaaaatatctcagtaatatttttatattgattacattttgaaatgacaatattttagatatatttctttgaataaaatatattactgaaagtaattgcttatttttactgttttaattgtggttatagaaaatctaaaattacagatatgtcatatttctgttgagagcatggctttaagtatcgagcacttgagaatgttgagtattcaagtgattaggttctgtttctacagtgtattttaatgtttgctttgctgtacagttgtgttagacctattacaaccagtacttacttttacatgttggcccataagtaagtatacataaggctattcatttttcaagattttgattgaaatgatacattatttacaaatgtatttctgcactaatgtttttaaaactctctttttatttctcattttagtttttttaatagaggaaggaaatgtgttttagaattttcactcaactattaatgatttttaaaacaaatctaattggtgcttctaagaaacttaagagtgaattaaaaccatgaaatatgaaaaaatgtatgctcttattgcttcttgagaggttggttaacctctgtttttcacagtcaaaaattctcaagaagttagtgactatattaaatctaaaactggcaaatgccttttaatgaagaaatctttcaaaagggacagtttaaaagacttaaaagtaactctttgtcaagaagattttatgacaaagataaatttcaatgactctttacttaatgttcctaaaaatataagctacctaaaaactcctatgattttcttaggtaagggggacttaccagtggatgctagtattcagtctgtctattactttatggaaagtaactgcttttaagggcagcttttgtatctatttcatcttcaggagtatctcttctgatttttgagaacagtagtttgattgctgcacttagctttgcttttcttagtgttgtagttgaaaatgtgtaacgttcttggtaaaactcagaactgcattaaggaaaagatgggaagttgagcattagaattggtgtcaccaggccatggttgtacttttggctttaatacttgatttctgtgtatatccttcctttcttataggctgaagataaatggttgcttgaagatttaatgttcaaggtggttcaaagaaaaatcactttgaaaatcaagtaacatatgtcattgttagctaagcctattaattaaaacttatattcattaaaattgcattcaaatggaaaacatcctttcttaaaatttaatactgtttatatagttacacatctttctatatttattatgtattcattacatgaaaaattactgatacctatggaagaattttattcagtcacatatgatactgtcacttaggatatttttgtaaagtcaaatctaactacctatagtcataaaactgttctaacttagttctatttcttgatcagttttatagagtatactcccagaggcatcccggcttcttttgaagaagtaagcttaaggtacccagaaagttaagtaaatttatttcataaagcaagtagtttagatttttagactgggtagctttaagtcatttcattcttcttggtggtgtttaccatcaatttgcaatgtatttcttgttaaagtttctatctctgaatttatatgattatttttacttcttaattcttaagtgacagattttaacattagcttctgttttcaatagatatgatacatcttttaataaacaatctaaagtaattattaaatcagtacatgatacatcttttaataagcataaccttctaaagtaattatataatcagtataaatatctttcattattttcataaagatcatagagcatagtgactcagaagtggcttgcttttatattaggccaaaaaatagaatactcaaagcacagtaataattagtaactgaaccatggaactgaggtttgacaatacgtttctccgtatctctaagcaggctttacatgtgtcttctcgtttgtcctcccttccccctcattatctttcctctcttcttctttctctttccttccctccttgctttctaagtttacttagttgttaatgttccctaagagcttaaatcctttaatccaaaatgttggtattaatgtgcactaagaaaatcagtattttgggtagcagtttaaattgcttctcaaaatccttttattggtacctaactacaatagagtatgataagtgctttaataattaactattataaagtatgctaaatgcttttataaaaatatattcaaagtgccagaggggaaagatcttctgttgaagagggagcagaagagaatgcttcatataagaagtgacattttaattgggtttgaaagttgagtaggagtttcccctgtgcctgatgtaaggcagattaggcaaaaggagcagcattcattcaacatcaacaaataataattgcgtgatgattgtattccatttactgttcaagacattgggaatataatgatgactaaaactagtgagacttctaccttcatggagctgatattccagtggggagacagactgtattagtctgttttcatgttgctgataaagacatgcccaagacttggtactttataaagaaaaaaaggtttaatggactcacagttccatgtggcataggaggcctcacaatcatggtggaaggtgagaggcatgtcttacatagcagcagacaagagagacaatgagatccaagtgaaaggggtttcccctacaaaaccatcatcagatcttgtgagacttactcactaccacgcgaacagtatgggggaaaccgcccacatgattcaattatctcccaccaggtccctcccatgacacgtgggaattatgggagctacagttcaagatgagatttgggtcaggatagagccaaaccatatatcgcagataaacaagtaagtgtagtgaaataaaactatggcaggataagagagaagaatgagacttgtggaggtgactctattaatttaaataaggttgtttggtgtgttttgagaaaccctagtcctgagagatctatgagaaatggattctggggacaaattagtttgagaaacgttaccctattaagttctgccataaagaaacttatgtaattgtggattaaagccagttaaacaagttattagacaagaaaacccccgatcatcactaggattttgtgagctaaagttccaaagagcacattgcaggagaagctggaccagagtatgaggatccagtggccaggtaggacagggtaggagcctttgaatcatgatgaaaagtttgtgccccagccatgccaggattagatttggcttttagaaaaggtactcttgtggcaatgtggcagctatcttgagtgaagaaagtataaatcaagaagctttccaataaaaaagagaatgatgaaggcttcaaaaatggagagaaaagggtagattttaatgacatttggaggtagaattgacttagataactttgtttatagataataaagagtcagaaaaattcttgacatataatgttttaaagaaatgaaagtacatcttcaagagagggaaacttggccctgatctgccagtcagtgtaggtcacagcaagtcagcagcaggctaagctgtgctgagtgtgtgagaaatgggagcaaagtcatatgttcaaaaatgtgcaagacttggcatctccaccacagttttctttcacctttgaaatatgggaaggttagaaatggagtggaaaaatatcagcccagtctagttttgaaagattgagtttttttaggaagaagcaagcttgttatcatttttaaataagacaaaacatgaccttgaattagattagccacatatctaattggtgagtacagcatacctagctgtacagcgctctgctcaccaaagccaaagatgggcaggtggctgaattctgctgccaggtaatcatctgaacctcgctggcaggcattgaagcaaaagagagagaggaatttgcagctggctggaaatattaagagtattagcaagagggaggaagtgtggctcaaagttataaaatgttgtgtgtgtataaaaagaagagagttctatttttgtatatgtatgtgttataaatagacatacctatagcatttcccaccagtgttctgtatcatctatgttccatcactgattaaatcagaaaaatatcaccttatttgctttttgctcctcaaccgcaaagaagtctttggtgaggtgctttactagaattgtcttacagaaaaaatatcagtaattcatcttgaggatgaaatagtagatgaagtataattaatgcttctagcaaacttagcaaatacaaatatgaactttttgtgaagatgaaaactgcattttttttttttttttaagacagggtctcattctgtcacccagactggagtgcagtggcatggtcaggactcactgcagccttgacctccccgactcaagagaacctcccacctcagtcccccaagtagctgggactacaggcatgtgccaccatgcctggctaattttttgtatttttattagagacagggtttctccgtgttgcctaggctggtctttaactcctgaacttaagcaatccacctgccctggcctcccaaagtgctgggattacaggtgtgagccaccacacccagcctatttttaaaaactgtaatattcttactggtggactttattcaactgatagagaatcgttaaaaataaagagaggccaggcatggtggctcacacctctaatcctagcacttttggagaccaaggctggtgggttgcttgaggccaggagtttaagaacagtctggccaacatggcaaaaccccatctctattaaaaattcaaaaattagctgggtgttatggtgcgcatctgtaatcctggctacttgagagctgaggcaggagaatcacttgaacctgggaggtggaggttgtagtgagccgagattgtgccactgccctccagactgggtgacagagtgagactgtctcaaaaaaaaaaaaaagtttaaaaatatatagagtttaaaaatacgaattaccaaaatattgtagtttgatgtcactactactcactttttctttctttcttttgtttttttctgagatggagtcttgctctgtcacccaggctggaatgtagggttgcaatcttggctcactgtaacctccacatcccgggttcaagcgattctcctgcctcagcctcctgagtagctgggattacagacacgcaccaccacacccagctaatttttgcatttttagtagacatggggtttccccatgttggccaggctggtcttgaactcctgacctcatgatccgcctgccttggactcccaaagtgctgggattacaggcgtgagccaccgtgcctgtccactactcactttttcttagccttttgattactgatgaactagattagaacagtaagtggattgttacacttgacattttgtactttatctggaaatactggcattaaaaactaagtcatactgccatctgtataatattcttagatctttatatgagttttttcttcaaataaaaattgtgtttttaaatgtctttgatatgattgttcaaaatgtttgatatttttctaaaacagatttaggaaacttctggccccagcatcagaatggacccttgatttggtttcctctgacctttggaaaactgttctttgttattattgcaatatgcaagaggacctcataaggtgctctggttctttcagaatggaacatgaaaactggagagttagtgtcagtgctcattgaaacatcttttgtgagctatgggttagactttgatgcttacaagccacataaatggcaagccatggactcatttacttatcccatttctctggatttccacatttttcttcctattcttgttttttgtctcttcattatatttcttcctcttgatgggtttccacctctatgtagtatgtgttttcctgacctattctatttctgaccctcactctgcgcagtcctggcctgccatcttgggaagctatctttttaggagccaagaccagcttgtgaggatggatgtctgggctttcagaagctatgttgcagaaacaaacacaggcaaaaagtactcttgcctaacaacatcttcattactttgtggagtatttcagttttttcttaatacgttttttaaaatttttattttagattcaggggggcacatgtgcaggtttattatatgggtatattgcatgatgctgaggcttgggcttctaatgatcccattgcccaagtagtgaacatagtacctgataggtaatttttcaagtcttgtctccttccccccagttttagaatccccagtgtttattgttgtcttttttgtgaccatgtataaccaatgtttagctcccactttaagtgagaacatgaggtatttgattaattttttctgcattaatttgcttaggataatggccttcagctgcatctgtgttgccataaaggacatgattttgttctttttttgtggctgcatagtactccatggtgtataagtatcttgtggaaatttgaccctaaattctgtttcacacagtgtaccttaggcatctgttcttggattttggtgttcgccaggtttgtaattttgatcctatatcataagctgaattttagtgtcttggtcataccttaatgcttcatttccttcacctgatttttagtttgtatttcctgccttggagtcatccaaccccctcagcaagttgtattagtatcaacatcaaaatagagttacctgcagaatatcttaatacagtgcttagtggtgatgttcatattggaaaaatttaacaaaacgaagtgcagaagaagtttcaggttgcagtccatatacaaattctagaacatcagaatcacttgggaagattttgacgtcagcaaagtatgcatctaagaagtcctaactctaagagacatgaggtatcatactcctgtttctacatagaaaatatctgtttgttaatcatattgtttagtggctactacgtgatattttgggtattttacatttattttatatgataggtttgtttttcatattggcattttcccgagttttagaactagttatttaggaaatcagttggcaggggaaggggttgagtggtagctcatgcattattttaagacattggaggacaggttcctcttgagtattttcatgcagaacatctgattttagaaatattttatagccattaagtgggaaatgctcctgtttccaaatctgaccacttaccatcgccactaatattgccaccctggtccatggatctaccatctattccctgaattcctgtaatgagctccctgtttctacctctgtcctttccaatctgttcccagcacagcaggcaaaaatgaaccctctgtaaatgtcagttcactttagtcctgcacatagaatattgtattagctccccattttactcagagaaaaagtcaaacttcattccttggtccatcttttcttttcctatatctctgtattatagatcataatctgaaatgaaactatatattcattagttggattttttggagtaatgttttatgttttctaccttaattttaaaagcatgtaagttatcttcctttaaaagaaagattattaatttgtatgtgatttttaaaattctttctgcggttaatggccctcaccctcaggagacagatactccaattttaatatatttcctcatttctgaagtgaagataaaagtatctaccaataatacttgtttacctcaaaaacctctattgcctttttttctcatcacacctttacttatttatagaaaccttcatctatctcaaatatgctgggacatgattaaagttctttaagctatcctgatcatagttgaatgacttgtttatagatttgcagcagattttaaataaaaattcatcctaatagaataaaacaaaaataaaagtaaattatttttgttaaggaagagccctctctgcgagtggggtctggtcaggggaagattgtagtgtgattaatttaaatttaatttttttatggaccctaaaaattgaacctaaaatttgcaatacatctgtttttctcacattctgtggcttttatgtcagttttctttagtaagttttttacacatgtggattacccaactaaaatttttattaatatgatttattatttcttcatagcatgtttcccaaacatatacatactagattgtatgtatgtatgtatatcatgttacatatttactttttatatggttgagcttttttatttctgtgaatccatttcttcttcaggtaatttatgggatcatctaaagcttaaatttatgtttgaagtcttcacttctccaaaattctaattcagatattaatatattattatagatgtttgtcagtaattatttgcaagtttatctcatcacaatttgaaaatatgtatgaagagcatcagacaacatgaactcagtgttagcgttacttggaaaacttgcaaaataaatttaaaaatgaaaaaatctcattttaagttgattttttatattttgctctaataattcaagagaagtagacaggccagataggcagactggcagaaatctggcctctgtggttggctggcatttatacaggtctttcatatatgatttaataaaaggtgacacgaaattcagaaatgtaatctataagacaatcagaaaagcaatttttgaagcacattcttgtcagtattgtataatgcctgttctgtaactgtaatttttttgtgtgtatctgtcaaatgacattaagctatattcaataatgaggatagcaagaatttgagaccccatgttcatttctttttgtgacaggaagatcagccttttaaaacataaaaaaggaatagaaattaacatttctccagaattatgtttccattcatttgaggttatctcttaattccagcattttactgcatttgataaataggccaaatatgtgttttatttatttgagggcttgggggaggcaatgaaactttacaaatttcaactggcattgcagtctgctgataaggatgggagtttgcaccgctctgaagagattacatgaagtagagttggaaagcaaattgtatttacaaaagataggatgatgttcctaataggtgttcagaataggctattcactctcatattctgctgagctttgctagaaataacttcatttcaaaaaggacaaatctgactgaaggtaaaagcattccctcttcacagatacttgtccaaaagggtttacattaaattttcctgatgggcacacagcagtattttatgctgtatctgtataaaccattaacgtggaaaataaatatctaaacagtatacttgattgcttcatgcaccaaccattagattactagatttctatctacagtttttggagagatgttgcaatatgatgttctgacaataactgtcaaagtcatcataccaggatccattttcatcttgctgttgaggtaaagttacaaaaatgtacagttggtaggtcagaaagatcactatctcttgtcatctgtggtttaatgctgacctaaaccactactgtataatgtcagaattatcacagtgtccaggctgcagaagtacaacatgctacatgatttattgcatttcctgtctggaatgaagattatgaaaaggccaacagctgtgagctacagtggtttagaagaaaacttaatttctaatttttatttgtctttttcctcattcattttagattttggatttagtaaaggggacacattaccaggtagcctgtcaaaaatactttgagatgatacacaatgtaagtatttttttaactttatatcctaattatttgtcttttgttactgtgtcacattcagggtttttagttgcagcaatggaaaccactctagctattttcagcagaaaaggggattgcatggtattaagtaacttacagcatttattgaacgaccagacaactaagcttggatgctgcagaaccaggaatattttgtaactaggagaagctacctcatgagaaaatctttactacagctgtcacccaccactccatatctagggatgagcccaagggtcaataaagtttttctgtaaagagccagagtgtaaaaattgtaggcttcatggtccatatggtctgcgtcacagctactcaactctactgttgtagtgcaaaagcagctgtagaaaatatgcaaatgaacaggtatgactgttgatccaatagaactctattgataaaattaggtagtagacccagtttgacccacaggccttgatttgccaacctctagactagatctggaatctttgccacagctgcctagaagaaccaaggcttttgccatcttccatgcagaaaatctgatccttgtacttgtggctgccacctgatgttactgtaatccacttcccaagtctcatacttatctgcatggcaaaacctagattgcatgtggacccctaactatacacgagtcagggaaatgtgtttggtttttatcttgccagcttccttagtacaaaaaagcctgcttgattattagagtaagagtgggatgacccagtctggcacagaatagattttgaagtgtgtaaagccaatgtcacaaactcagaggcctacagagattgggcatatagcccaaaaaagtgaagctgcctgagattagtaccacagagtatagcagaattatggtgcactaaacatgtttgccctattagaggcattcacattgacaaattgtgaggccctctgcaggccaacaaaacacatctccaagtccaattcagtcctctggccctagtttgcatccactgatcctgagcctggatttctaacctgggaaagacatccaagaacggactttggagatccttgtacttcttgaaacattttgtctctaagtacatatgtgtatttttccatagtccatgttatttattaaagatccatgaccctcccaaaaaggaagttgcgtttgttgaaatcatcatcagctaccatgctaaagttttacaattatttttatgttttttatttggttgttacaaagtagtttttctattatggttatataattgcagaatttctaacttgataaaatatctcataggaaaaagatattttataatattaccaataataattaaaataataatagtaataccagccaatatctatggaacccttaatgcagcggtccccaacctttttggcaccagggaccagtttcatggaagacaatttttccatggttaaacaggggctggtgggagggcacattagataatcacgagaaacacgcaacctagatcccttgcatgcggggttcacaatagggttcacacccgcatgagaatctaaggccactgctgatctgacaggaggtggaactcaggcagtgatgcaagtgatggggagtggctgtaaatacagatgaagctccactcactcacccactgctcacctcctgctgtgaggcccaattcctaacgggccgcggactgggttgggaacccctgccttaatgtataccaggcacagcactaaaatttttgaatgcattagctcttttgattgacatgacagcaagatactatatgtatatttccctgtctgtgaataaaacttagagaagttaaacaatctgtgtggggtcacactacttataggggatagaacttagatttaaattcaagctgtctaactcatctaaagcttgttagcataactatgactgtactgttctatgatatttggtactaaatttgtgataatgacagcagaggtaattggcattttcctgtttatcttcatagcatggtaaacaggtagggactctaacttgccttacatgctgtaattgattaatggaagatctggagctagagccccagtctgttgtgggtcctgtcctcactcttctatacctaacttttgaaagtattattcttatttaaaagctttttttaaaacaaaactcaaggagtaaacatcaagaaaatagcaacaacaaaatctcattagttttatcacactaggaatctcgccagataagccatgtttggcaacaccaggtttatatgagtcactctctcggagactgcattctttaatttggttgctccgcttgagagttttaatttcctattgttctttaatcatttgtggatgcttttaattaagaggcctcagaattttcacaagtgaagtctattatccaacctctttttataaaaataagatatgaaaattagatttaaacattgagtttgtggcataatcaccaaaaagtaaggagtggtttttatttctcaaatctgcttttgtaatatctctcctattgattattccctcaagtattgccactattgccaatttttaaaacttgttttagattaatgaagattttggaaagacatatatctaaatcccctcacatataaaaatagtcaacttaaaccacacttaaatcaacaaaataaaaaggctgtttgtattcactagatctctcactgtggacttttagatgtgaatatcctccttcatttatattttttctaatttaatttaaaaatagaatctatttttattgtcaggtttctgccatcctacccctcccccaaataaaatcctatgtttattttcccgaggcctctgtgatcaaacttacttaaatggaagttttgaaaataaaccagttaattgataccatttgcagcagcactatgatagttccatatggcttttttggtaataccagctgcctcattataagctgtcattgcaaaacctcttgattaaaacccaaatatcccataggtaaaacaatattgctttcattccttcaaaatctacatttgcagtggcagaaatatgagacccatgtttgtgtgaaggtcattgtgtgcagaatgtgctgattccaagcaaatgtttgagagagatttatttagtagatgttaaaagctggcctgcttgaaacctgttttcctctgtatttttagggtcaatgtttaaaataattttatactaatagtatagtctttactttctgcatgttccatgtataaatgaaaacactaggtcatgtgtagattaaccacagaattttaatagaaaataatgttttcagaggtagacctctttggacactgagtaactgtgggtacttattttccaaatggctgagcataatttttccccaccatataaatctctagagaaatcttattaaaacctatcacacattttcctgaaatcttaaacaggatatatgtgatacaattaagcccttttataataactcagggtcatcattatggatatcagttagaatgctggactagaagccaccatcatctcacttggatcactgcaatagcttcctaactcgtttcccagcatctacacatgccccattccaattctttctcctccacacagctgctggagtgacctttaaaacagagaaatctgatcatttcaggaacctgctttttaaaaacttcaatggcttcctatttctcttaagatgaaatctaaaatgtataatgtatcctctaaaggcctccactccacccaccttcctctagactcctaaatttgtttcagatcctttacaggactttggacctgaaacagtaggaccaagctagtgtggtagaatgcaaatgcttcacagaattttcccatctcaatacataaaataatgcacaaaacacaattttttttaaatcatcaaccacaaagaaaaacatcagcaatagtaaccaaaaaagaaaacaggcaaggaaagaaacaaaagagtcacagtagacaaagtcatgaaaatgctcacttaatatttccaaacagagtaaaggaaatagctgctgacttgagaagaaataagtgaaatggaggatttagatgtagatacctctatttctctattccttttcctaatttaattttaaagtgaagatttccattctgtttagtttatactcttccccttccccccacatacaaaaaaaccccctaagtttattttcctaaacaagacaaaaggaaacagccatatgcacttcctttaaaaatgaaagtgaaagaaacagaacacaaagaactcatcctggaagaaaatagaattctataaaaaggaaacttcatcatttcattttgctatcaagcaacttagtagatcacaaagagcttcacaaaatgagttaaggacaattgcagatcaagaaaaaggagaaacagcatcacagagccatggcacaaatcctcacttcaaggcccttggcactgttttagtggttaataaaaaaagattaattatctctgaaaaaaaggcagcagccccagtcaggggcttatagataaaatccccatctccctgggatggagcacatgtgggaaggggcagctgtgggtgcagcttcagcagacttaaacgttcctgcctgccagctctaaagagagcagcagatctcccagcatagcatttgagctctgttaagggactgcctcctcaagtgggtccctgaccaccatgtctcctgactgggagacacctcccagcaggggccgacagacacctcatacaggagagctccggctggcatctggtgggtgcccctccgggacgaagcttccagaggaaggaacagggtgcaatctttgctgttctgcagcctccactggtgatacacaggcaaacagggtctggagtggacctccaacaaactccagcagacctgcagcagaggggtctaactgtcagaaggaaaattaacaaacagaaaggaataccttcaacatcaataaaaaggacatctactcagaaaccccatgcaaagttcaccaacatcaaagaccaaaggtagataaatccacaaagactgggagaaaccagcgcaaaaaggctgaaaattccaaaaaccagaatatctcttctcctccaaaggatcacaactcctcaccagcaagggaataaaactggatggagaatgagtttgacaaattgccagaagtaggcttcagaaggtgggtaataacaacttcctccgagctaaaggagcatgttctaacccaaggcaaggaagctaagaaccattgaaaaaaagttagaggaaatgctaactagaataaccagtttagagaacataaatgacctgatggaactgaataacacagcaagagaacttcatgaagcatacacaagtatccatagccaaattgatcaagtggaagaacagatatcagagattgaagattaacttaatgaaataaagcaagaagacaagattagagaaaaaagaatgaaaaggaatgaacaaagcctccaagaaatatgggacaatgtgaaaagaccaaacctatgtttgattggtgtacctgaaagtgaccgggagaatggaaccaagttggaaaacacttcaggatataatccaggagaacttccccaacctagcaagacaggccaacattcaaattcaggaaatgcagagaacatcacaaagatgctcctcgagaagaacaaccctgagacacataattgtcagattcgccaaggttgaaatgaaggaaaaaatgttaagggcagccagagggaaaggtcaggttacccacaaagggaaacccatcagactaacagcagatctctctgcagaaaccctacaagccagaatagagtgggagccaatatacaacattcttaaagaaaagaattttcaacccagaatttcatgtgcagccaaactaaccttcataagcaaaggagaaataaaatcctttacagacaagcaaatgctgagagattttgtcactactaggcctgccttacaagagctcctaatggaggcgctaaacatggaaaggaacaactggtaccagcaactgcaaaaacatatcaaattctaaagactatcaacactataaagaaattgcatcaactaatgggcaaaataaccagctagcatcataaggacagggtcagattcacacataacagtattaacttgaaatgtaaagaggctaaatgccccagttaaaagacacagactggcaaattggatgaagagtcaagacccatcagtgtgctgtattcaggagaccatctcacaggcaaagacacacataggctcaaaataaagggatggaggaatatttaccaagcaaacagaaagcaaaaaaaaaaaaaaaaaaaaaaaaagcagggattgcaatcctagtctctgataaaacagacttaaaaccaacaaagatcaaaagagagaagggcattacataatggtaaagggatcaatgcaaaaagaagagctaactatcctaaatatatatacacccaatacaggagtgcccagattcataaagcgagttcttagagatgtacaaagagacgtacactcaagcacaataatagtggaagactttaacaccccactgtcaatattagatcaacgagacagaagattaacaaggatattctggacttcaactcagctctggaccaagtggacctaatagacatctacagaactctccaccccaaatctacagaatatacattcttctcagcaccacattgcacttattctaaaattgaccacataattagaagtaaaacactcctcagcatatgcaaaagaatggaaatcttaacaaacagtctctcagaccacagtgcaatcaaattagaactcaagattaagaaactcactcaaaaccgcacaactacatggaaactgaacagtgttctcctgaattactacagggtaaataataaaattaaggcagaaataaataagttcttgaaaccattgagaacaaagacacaacgtaccagaatctctgggacatagctaaagcagtgtttagagggaaatttatagccctaaatgcccacaagagaaagcaagaaagatctaaagtcgacaccctagcatcacaattaaaagaactagagaagcaagagcacacaaattcaaaagctaccagatggcaagaaataactaagatctgagtagaaatgaaggagatagagacacaaaaaacccttcaaaaaatcaatgaatccagaagctggttttttgaaaagatcaaaaaaatagactgctagccagactaacaaagaagaaaagagagaagaatcaaatagatgcaataaaaaatgataaaggcgatatcaccactgatcccacagaaatacaaactaccatcagagaatactctaaacacctctacacaaataaactagaaagtttagaagaaatggatacatttctggacacatacaccttcccaagactaaaccaggaagaagtcaaatccctgaatagactaataacaagttctgaaattgaggcagtaatagcctatcaaccaaaaaaaagcccagaaccagacagattcacagacaaattccaccagaggtacaaagcagagctggtaccattctttctgaaacgattctaaacaacagaaaaagagggagtcctctctaactcattttatgaggccagcatcatcctgattctgaaacctggcagagacacaacaaaaaaagaaaatttctggccaatatccctggtgaacatcgatgcaaaaaatcctcaataaaatactggcaaactgaatccagcagcacatcaaaaagcttatctaccatgatcaagtcagcttcatccctgggatgcaaggctggttcaacatacacaaatcaataaacataatccagtgcataaacagaaccaatgacaaaaaccacatgattatctcaatagatacagaaaaggccttcaacaaaattcaacatcccttcatgctaaaaactctcaataaactaggtattgatggcacatatctcaaaatagtaagagctattttttgacaaacccacagccaatatcatactgaatgggcaaaaactggaagcattccctttgaaaaccggcacaagacaaggatgccgtctctcaccactcctattcaacacaacattggaagttctagccagggcaatcaggcaagagaaagaaacaaaaggtattcaaataggaagagagggagtcaaattgtctctgtttgcagatgacatgattctacatttagaaaaccccgttatctcagcccaaaaacttcacaagctgatcagcaacttcagcaaagtctcaggatacaaaatctctgtgcaaaatcataagcattcctatacaccactaatagacagagacccaaatcatgagtgaacttccattcacaactgctacaaagagaataaaatacctagcaatacaacttccaagggatatgaaggacctcttgaaggagaactacaaaccactgctcaaggaaataagagaggacacaaacaaatgggaaaacattccatgctcatggataggaagaatcaatatcgtgaaaatggccataatgcgcaaagtaatttacagattcaatgctatgcccatcaagctaccattgactttctacacagaattagaaaaaaactactttaaatttcatatggaaccaaaaaagagcccacatagccaagacaatcctaagcaaaaaaaaaaaaaaaaaacaacaacgctagaggcatcacgctacctaacttcaaactatactacaaggctacagtaaccacaacagcatggtactggtaccaaaacagatatatagaccaatggaacagaacagaggccccagaaataatgccacagatctataaccttctgattgttgacaaacctgacaaaaacaatcaatggggaaaagattctctatttaataaatagttttgagaaaactggctagccatatgcagaaaactgaaactggaccccttccttacaacttatacaaaaattaactcaagttggattaaagacttaaacgtaagacctaaaaccataaaaaccctagaagaaaacctaggcaaaaccaatcaggacataggcatgggcaaagacttcatgactaaaacaccaaaagcaacggcaacagaagccaaaattgataaatgagatctaattaaactaaagagcttttgcacagcaaaagaaactatcatcagagtgaacaggcaacctacagaatgggagaaaatttttgcaatctatccatctgacaaagggctaatatccagaatctacaaagaacttaaacaaatttaaaagaaataaacaatcccatcaaaaagtgggcgaaggatatgaacagacacttcacaaaagaagacatttatgtggccaacaaacatgaaaaaatgctcatcatcactggtcatcagagaaatgcaaatcaaaactgcaatgagataccatctcatgccagttagaatgataatccttaaaaagtcaggaaacaacagatgctggagaggatgtggagaaataggaatgcttttccactgttggtgggagtgtaaattagttcaaccattgtggaagacagtgtggcgattcctcaaggatctagaaccagaaatatcatttgacccagcaatcccattactgggttgtacccaaaggattatacatcatgctactctaaagacacatgcacacgtatgtttattgtggcattgttcacaatagcaaagacttggaaccaacccaaatgcccaccaatgatagactgggtaaagaatatgtggcacatatacaccatggaatactatgcagccattaaaaaggatgagttcatgtcctttgcagggacatggaagaagctggaaaccatcattctcagcaaactaacacaagaacagaaaccaaacactgcatgttctcactcataagtgggagttgaacaatgagaacacatggacacagggagggaaatatcacacaccagggcctgttttgggggggtggggtgctaggggagagatggcattagtagaagtccctaatgtaaataacaggttggtgggcacagcaaaccaccatggcatgtgtatacctatgtaacctgcattttctgcacatggactccagaactttaagtataattttaaaaatattaattaaaatgaggattcattaatgatatgcacataccttaaatattatatcttaaagttaagatatttaaatgccatttattagttagagcagggtcttttgagtatcgtttagtgtttggaatttgattttatctttcttttataaactatacccataatacagcatcagcaatttccagtttggattccttaaagtagaaaaggaacttgatatatgcaaagcaataggatctttctccctctccttctgtgacttccacctttttttttaagtgacttgcttttcttgactctttaaaaacattttatttagatttcatagaacaactctttttatttacattcatttttatttacttttctcgtagcaaccctatgacctaacactgttatctccatttcatagatggagaaactcagactttaaaaagattttgtgcacattgaagtctaataaatgtattgataactgacaacttgaagcgaggtacagaaaatgccaagatattattatagcataagatactaggttatttttgcatgaaataatacaactatgtttttataatctttgtagccaagtttatctctagaaataaaatttataatggagatatcattatcagtatgattttgcatacaatctcttaaaacagatttcagagcaactaatgatctagtcagaaggcctgaattttaattcagacaaaaccagttactaattctatgaccttgaataaactatctattctccttaggcctctgtacatggaggagattgaatttaatggattccccaaggtctttctaatctctgattttctgtttacaaactattttacaaactataaagccttctgattaaaatgtattagacaataagcatactttttgtgaaacacattgcaaaatgcaaaattatattggatttcccagtttttaatgagttgggtgaaaattgaatgtaataaaaaagttcataataaaaaagttcataaatgattccattgttaataaaaattataaatataaaacatttcagaaacattttgaaatcaagcagctaagttaaaaaaataaagcaaagataaaaatttgttcttaatgatctataactcttaaaatcagtctgtatactatccatctgttacacactggaattactataaaattaccctaacatatattaacaactagcaaaagagaatcagagattcctagggtgcttaaataagtattaccagaaaagactcatgtttctgtctgttggtccgtccaccaatagggttcattctagaccatggcagcaacccctttttccctggccaattcattttaatctactataagattatacatagctttaatcacaccacgtctctttttaagggtttttggtgactctgttgcctagagaattaggtcttgaccacttaccctgattttcaaggctctctcaggctggcccctgcctgtctttccaacctcattccttattgtttccttgtatgtgcctttcatagtaggctatgtgaactatttaatatttgctttcccaggacattccctctttaccttgctcatgtggtcctgctgcaaatattgcctttcccctcatcatcccagcttttcactctctccatctttccagacgcaactcaaatagcactcctcttacaaagccttccttgatctccttagccgaaatttctctttactgtggagtgtaataggcctttatctgtgaccctcatcagttctccattcttggtagaggtttttaagtctgacttactgggttggaaatttgagttagtcaaatgtattcctgtatgctgaatagcgaatagtttataacacagtcttttatatagtaaggctttaattaaatatgcaaaattatcactggtatacactatttctgggttcacttcaccaaatatttattagatacctacagtgtgcaagtcacttcagtacgaagggtgagacgtaaaaggattagttaatacaagacagatgaacaaaagaaatggaatcacttctcagtttccaaaaacttgataaatgaaaataccaccaaagaaaccaacagtcactcactcaagcaaaatgatatttttgttgtcaactccaactgcagaaggcgagaaggcagggatttgagactgtgggaagtgaaactgaatataaggagagattactagagtgcataatttgaaatgatactcaaaactaaagtttaatgatagtatttgagaaaaaataacataagttatgaaccaggcatgtttgtattcggtcacagtgaaatttacaagaagagattttctgtaaaaagaccaaggaaaggccaagattagaatgaacaattacattgacttaggttgctttttcagtttatatcatactaaatgagtgcacatgccagacttacaagtcagctctaaaacacaagtggtatcagggaccagtatcaaaatgatcaaaaatgattttacgatcacttaaaaacccacaaatatttattggcctacaatgtggtaggccttttgcttggaactggggatacaataatgaatcacacaggtccctaacctgtgcctaatatacaatgtcattcacacacatacacacacacacacacacaggtttgtattccaaacatatttttatagttttctaattttttgttttgacgtaattgtcaagcagaattggtaatgttttgggtattgccagaattgagggcttggtgtagatgggaggtggcaggtgggagttgggggctggggaggtgagagaaaggtgtctagtatgccccaaggatgaatggtgataccagtcactgagagcaaaggatggggagaggggaaaggatacgtttcctgttgggtttgagctgcctttgagccatcttagatgttgagtaggtgttggatatgggactgaaactagatagggaactggagccaaacacagaggctcagactagaaatataaatgtgggagccatttaggtttgggtagtggttgaagctctctttgaatgaaatggtgtaagtagctgattaagcgttagaatgcaaacagctagaatccatgtttcaggtattaagttttaaacaagtactaaaacagcttttgaaactcatatatttatagctttgccatgtattaatgcaatataaatttccttcctttacaggtgggtgattgtggcttttctttgaatcatcctaatcatttcttttgtgagagccaacgtattctaaatggtggtaaagacataaagaaggaatctatccaaccagaaactcctcaacccaaaccaagtgtccagaaaaccaaggatgcatcatctgctctggcctctttaaattcctctctggaaatggatatggaaggactagaggattactttagtgaagattcttaggcagttttgtaaccctttttcctcaatagcctgtttcctgtttttaagattttgcctttgttgttgaaaaagtgttgcactctgttgtgtaattgtgacacaattacagctgattgcagcctcaaccttcccagctcaagtgatcctcctacctcagcctcccaagtagttgggaccacaggtgtgcaccccatatccagctattttttttcaattttttttgtagagggggggtctccctatgttgcccaggcagatctcagactgctgggctcaagcgatcctcacacctcagcctcccagagtgctgggattacagttgtgagccactgtgcctggcctttctttttttaacctttttgtttaacttctctcttcactgcatcccaatccatctacaggcatgcacacttattaggaaagcaggtttgaggtaacgagactttcactatattttgctttgacagaaggaaagaggaagagtttctattaaaatctgtcacttgagtgatgtcattcaagtcctattttaggagataaaaacacctttggggactggttaaagtcccccagaaactacaataaagaacaacttttgttttaactcttaatcattttgtaattttgactcaatccttttctggaccatttttgttaataaatatcaaagtgta

SEQ ID NO: 91 - DNA, 41514 bp, Homo sapiens
cccgtgttctgcgttgccggccgtgggtgctctggccacagtgagttaggggcgtcggagcgggtttctccaaccgcaatcggctccgctcaaggggaggaggagagtcccttctcggaaggtgagaggagcgggctgtgcggaggctaatgggtgggttcccttgggggtcgacctgcgcgtcacctccgaccctcctctcgggattcgggtcttccaggaagggaaggagagggtctggcgtgatcttcccaacccaacagcggagcccttagcctgagtggagtatgtgttttgttccgaggggacgtctggcaaccagaggtctgcagttcagtgaacggagggagataagagagcagacgattccgggctggagcaggcgccagggttgccagacttacctcatttttccgcagaagctggcagtccaggttttacatgcaatctctccacctttaaatgttgacaagtacattttcccataatattttgcaggcctaaggaaacgtgtcgtctggaatgggcttgggggccacgcctgcacatctccgcgagacagagggataaagtgaagatggtgctgttattgttacctcgagtgccacatgcgacctctgagatatgtacacagtcattcttactatcgcactcagccattcttactacgctaaagaagaaataattattcgaggatatttgcctggcccagaagaaacttatgtaaatttcatgaactattatatccgttttcctcggagtgagagaaaactctttttagatatcatctgagaggtaagagactgtttttctgaaactgtggcttgaggaccacctgcatccagattaactgctttgtttaaaattcattcacagcagaactagtgaatcccagtcactgagtggagttgagagtctaagaacctctgaaatttgagaactgctggaccagagcctttagagctctgataaggtgtcaacagggtaaagctgcctcctgatcctgtactttctttcttcctttccttccaaacttaacgtttgataggagagatttgtattatgaaatgctaagcaactgctcagtgcccattactgactttttattgtagagtggggggaggtcgtttcatcagaaagggttgtgacagttccagaatctctgtatagaaagggcttagggggctgcaaccggaatggaagggggtggaaagttaaagcatttgtcttgaagctgtatttgcatagcagacgcagtttcacagttctttagggtagctttcagagaggctgatggagttgcccctgggcgccaccactgtttattaccagaatgttcgtgcttagaataatgcgttctaatagcagtgaatttcagtcctaaaaaagtacaggatcatttctgtaattctttttgaatttttcctttgttttttaattgaaatacttaccttcctacaaactgttttgagtttctactcctatttgaatttgcacgttgacccttatgattaatgccctttgtagaggcaatgcgatgccatcgcatgcatggttttgtttgtgcctggctccttgaagcatgtgtcaggagtgaaagtgcaaaagcactttggaaagactaaacaaacaataagcaacagtcaagtggcattagaggtagtattagtgattaatgtaaattctaccctatggaaattgtttgatagggaggagcccagctaaaatattaaagagcagtgattcttgaatatctgaacaatttctggccgggcgcggtggctcacgcctgtaatcccagcactttgggaggccgaggcgggcggatcacgagttcaggagatcgagaccatcctggctaacatggtgaaaccccgtctctactaaaaatacaaaaaattagccgggcgcggtggcgggcgcctgtagtcccagctactgggaaggctgaggcaggagaatggcgtgaacccgggaggcggagcttgcagtgagccgatataggccactgcagtccctcctgggcgaaagagcgagactccgtctcaaaaaaaaaaaaaaacaacaaaccaatttctgcattggactccaagctttctcttcatttgtctaagatgttttaataaatgtatttttctttaaatattactgttctccctgtctcttttcatatcaggtagttaatttggcaccatggggatacagggattgctacaatttatcaaagaagcttcagaacccatccatgtgaggaagtataaagggcaggtagtagctgtggatacatattgctggcttcacaaaggagctattgcttgtgctgaaaaactagccaaaggtgaacctactgataggtaagtctggaccttatgttaattctttgacaattaagaatgagacctacagtgcctttttttctcccccagaaacggattgttttcactcaatgccagaacttatcaggaagtaaaagttgtatgttttagaatattcccaaatcagggatgacttccttctgtgataataggcctagttttctttctttataataagccagagtatcaagacactgatggacaaagactattaatatctcctttattctttttttttttttttttttttttagatggaatctctagctcaggctggagtgcagtggcacaatcttggctcactgcaacctccgcctcccaggttcaagcaattctcctgtctcagcctcccaagtagctgggattacaggtgcacaccaccatacccggctaatttttgtatatttattagagacagggtttcaccatgttggccaggcaggtctcaaactcctcaagtgatccgcctgctttggcctcccaaagtgctgagattacaggcgtgagccaccatgcctggcccaattcttaacctaagataaattttttaacaaatgctttgaaaatccgtgatgatttctgactcccacattcttgggtacagaaaacatactgctaatcctggttagcaaaaaaacaaatgtgttgtaaaattcattataatttcatatttgctttctcctgaattttgctttatgatcagcaggtcccaatcattgttccataccaatgcaagttcactgtcactgatctacaacacatagaaaaaataaggataacaatgtagtgagtctttcatcaagatgacatatttaaaaggtcatcttttttttctttattttagctgctaagtttgcgttatgcaaaaagattaaagattgttttcccattcctgtttttgagctaaaatgtccttttctttataaaatgatagaagttgtaaatgcagttgtttttgtcacaatacctaatgtaatacctgacccttgattggatcctggatttggaaaaaatagtagcagtggtgtcctggagccaattcatatgagctctttatacaccatgtcttctcagctcagcattcatttgagttcaagtaggtagctcatctgccattgagaaatatttatctcagggaaatcaggcacctcttcccgcagaactggttgttaaacatttaccaggacaccactgaatataagaaacattgttgagacaagtgtaccaattataatataaactgagtattagataatattatgttactattaaattacttagctgtgatatggtgtcgttggaagaatccagtgtttattgtactattctttcaacttttcaatagatttgaaattttttaacataaaatgggggggaaagaccagatttgaaaccaaagatgtcagaattagaagggatatcaaagctctttaattcacagataaggaaaccaaggcttggagggtcaagtagttcaccagacatcacatggctcgtaagtatccaaggcaggatttgaatccaagtctagtaagttagagttccaattcctatgaaaacatctgcttaaaataacaaaataaaaaaccttctctttccatagttttctcatctggcctaaaatagagcagaagtattaccttaagaaaggtgaagcactgaatgtttttctttttttccataggtatgtaggattttgtatgaaatttgtaaatatgttactatctcatgggatcaagcctattctcgtatttgatggatgtactttaccttctaaaaaggaagtagagagatctagaagagagtaagttaattctctacttaatctctaacttcattgcactaaggtcagacactgtagtctatatgataccaatttttaaaattttaagccaggctcagtggcttgcacctgttgtcctaggtactcgggaggttgaggcaagaggatcacttgagcccaggagttcagcaccttagtaccctatgatcatcgctgtgaagagccactgtactccagcctgggcaacatagtgagaccccgtcactaacaattttatctttattttttgacagtctcactctgtcgcccagtctagagtgcagtggtataatcttggctcgctggaaactccacctcccggattcaagcaattcttgtgcctcagcctcccgagtagctgggactacaggcacgtgccaccacacccggctaatttttgtgtttttagtagagatggggttttgccctgttggccaggctggtctcaaactcctggcctcaagtgatctgcccgcctcagcctcctaaagtgctggaattacaggcatgagccactgtgcctggcctaaaaaaaaattaataaataaaattttaatttgttgaggcttattttatagcctagtatgtgaacagatttccttaaatgttatgtatctgctacattatcacttttgtttaaaagtatcttcgttactacattttctttgacaaaaagaattgctgtggaaaagcctaatggtaatcttgtgtgtgtgtgtgtgcatataatcattctaagtcacttgttctttttgccttagaagcctaaagcatctgggttaatgttctcaagggcctggtgtgtactttctaatgagtcaaaaacttttttcagttctaggaaagcttcttgaattacagttctgttacagtttcttgagtcagcctcttaaatgttttatatttaaaaaatgttcttcccttgcagaagacgacaagccaatcttcttaagggaaagcaacttcttcgtgaggggaaagtctcggaagctcgagagtgtttcacccggtctatcaatatcacacatgccatggcccacaaagtaattaaagtaagacaaaggggcagatgggcaagttcaccaaagctagttacaacttgtttattgatgggagaggaagaaaatcaagggtggaaaattgttctaggcctaacctcaagtaaagggcagatgtcagaaggagaagggaacagcatcactagatagagaagacttcagcaatttccaaggagaaatcctaaggcataagtaaggctctctcttttaagtcatgttattccatagcaatggaaggaacagggccaggcacggtggctcacaccagtaatcccagcagtttgggacgctgaggcaggagggtcatttgagctcaggaatttgagaccatcccgggtaacataatgagaccctgtctctattaaaacttaaaaaaatgaagagatggaaggaacaaattcctggaggcatcggtctcacccaactctcctacagtcttcaacacttactgtaaccggcactcttgaatgacagatctgtgatgtagcttcgttgccccaggcaccctacagacttctgttccctttcacctcctccttgcagcagcttctttccttattcctgtaaatcttagtgtcaaggtgcccacattcccagccctcactttcccctttttagagcctgcttggttaaggtgttgtggtttttttgttcgtttgtttgttttgaggcggagtttcactcttgttgcccaggctggagtgcaatggcacgatgtgggctcactgcaacctctgcctcccgggttaaagcgattctcctgcctcagcctcccaagtagctgggattacaggcatgtgccaccacgcccggctacttttgtatttttagtagagatggggtttctccatattggtcacgctgggctcgaactcccaatctcaggtgatctgcccaccttggcctcccaaagtgctcggattacaggtgtgagccaccgtacctggcctgttaaaggtatgatggtaaaggtgaagtcagctttttctagcttacagttctgtcatccagttcctgagctaaaataggcgctacacttctgattttggctttgtcatttgagtctctggctcttttctgtatgggtcaagctagaaggaaacgatgcgatgcaggacagagcgtgaagtataaagaaatgtgtgctctgtgtagtcaggagaagagaggctgcattgtgtgcggaagtagaggagaaaccctgattggacacaaatagtggtgtaaaagtgtgtccagaattggtgggttcttggcctcactgacttcaagaatgaagccgcagaccctcgcggtgagtgttacagctcttaaggtggcgtgtctggagtttattccttctgatgttaggatgtgttcggagtttcttccttctggtgggttcatggtctcgctggctcagaagtgaagctgcagacctttgcggtgagtgttacagctcttaaggcagcgcgtctggagttgttcgttcctccctgggggctcgcggtcttgctggctttaggagtgaagctgcagacctttgcggtgagtgttacagctcataaaagcagcgtggacccaaagagtgagcagtagcaagatgtattgcaaagagcgaaagaacaaagcttccatggtgtggaaggggacctaagtgggttgccactgctggctggggcagccagcttttattctcttatctggccccacccacatcctgctgattggtagaaccgagtggtctgttttgacagggtgctgattggtgcgtttacaatccctgagctggacacaaagattctccactgtccccatcagattagttagatacagtgtctacacaaaggttctccaaggccccaccagagcagctagatacagagtgtctattggtgcattcacaaaccctgagctagacacagggtgctgattggtgtgtttacaaaccttgagctagatacagagtgccgattggtgtatttacaatccctgagctagacgtaaagattctccaaggccccaccagactcaggagcccagctggcttcacccagtggatcccgcacggggctgcaggtgaagctgcctgtcagtcctgcgccgtctgcccgcactcctcagcccttgggtggtggatgagactgggcgccgtggagcagggggtggtgctcgttggggaggctcgggcggcacaggagcccacggagggggtgggaggctcaggcatggcgggctgcagtcccgagtcctgccccgcaggaaggcagctaaggccccgcgagaaatagagcgcagcgccggtgggccggcactgctgggggacccagtacatcctccgcagccgctggcccgggtgctaagccctcattgcctggggccgacagggccggccggctgctctgagtgcggggccgccaagcccacgcccacccggaactccagctggcccgcaagcaccgcgcgcagccccagttctcgctggcgcctctccctccacacctccctgtaagctgagggagtgggctccggccttggccagcccagaaaggggctcccacagagcagcggtgggctgaagggctcaagtgccgccaaagtgggagcccaggcagaggaggcgccgagagcgagggagggctatgagtactgccagcacgctgtcacttctcaaaaggatgagagtaggactattgctggaccaaaaaaggaaaaaaaatgagaaaaatagcaaattgttaccaaaattgatagcagcaggatcttgatacctctttcctctttttttctttttttctttttttttttttaacttcccaaagcctgtcttcaggccttgggaaccattttcccatagtttagaacatggaagttccagttccagctgcctagattttgacacagcggctatgataggggctgtttttcttggcaagtttattttaaaagtattttctcataatgcattggtttaaatatagtgctatagcctataatatatatgtaagatacattattagaggagagttatgtatgtgtgtatatatacgtgtgtgtgtatatgtatacacacatatacctacgtatatattttccccccaagacattgctggatatggtctataattttatcaatactgtgtcagtacattgactttcgtagcttgacaggacaacctgttatttttatggggaagatatattcaaaactccaaacaaatgtatattttcggaacatagccattcttaagatggaagttttctataatttaaaataagtgggccaggcacaatggctgaacgcttacaatgccaacactttgggaagctgaagcgagtggatcacttgagtccaggagtttgagaccagcctagacaacatggcaaaaccttgtctctacaaaaaatacaaaaaaattagttgggcatggtggcatgcacctgtagtcccacctactcgggaggctgaggtgggaagatcacctgagcccatagcccaggaggtcgaagctgcagtgtgccctgccggctggcaccactgccactccagcctgggtgacagagccagaccctgtctccaaaaaataaaatgattacttttgtaacttgtaggattcttttttcctctggctgtgtagcagtatttcttttctccaaattttataagttgattttttaaaaatgtcttaatggctatataattagttcaacatatactaaaacttacagtagaaaaactctacttcaaaggaaatgatttctcaaagtaatattagcatgtgcctgctgaggctagtaataaagtgggtttgaaacaggaagttgtttagtactttccagatgccgtgctagagattcactgtgattctctcttctaggctgcccggtctcagggggtagattgcctcgtggctccctatgaagctgatgcgcagttggcctatcttaacaaagcgggaattgtgcaagccataattacagaggactcggatctcctagcttttggctgtaaaaaggtactcacctctgactactatatattacttttctatgtagatagtagtgtaaatcaaggagctgaaatttttcctgtccaggaaattatgataatttataatatttataaaatttataatatttataaaatattacaaggtaaattattgtatttaatagatatttgcaactgacatctatttttataatgttaataattatttaaaatgaaaagaagggttttgctgcttgatgtttgtgtaatgtggatactttttcaaagtaagcccttaaggttggaggggtttgttattgttttatgcagattctttagtagaatgtggacgtaccagttttattttttaataatgacaacatatgctttatatttcttgattaggttaggtatactaacttatgtactaaagggttgccatgcagttatttagaattatgtataaaactatttcatggaaaactttatttaggggagaattaagatacaaaactacaggatgttctcatttttgttaatgcctatatttatgactagaagggtctctatcaaaaggttaatactaggttacagtgataaatgagggaatagggatgacttgttttcttcctgaatttctatattttccaaattttctacaataaacatgaattgcttcaataataaggaaaaagattacttaaaaggtacaagtgacagagaaagagaaaatgtttttcgtatgcattactgtttgattatcatgacaaccctgtaacacaagtaggaaataaagagatgcaaaaagagcttgctttataccagaattgtgacagttgagtcctagctgtatagccttgtctagtcatatcctatgcttcagcatactttatttgtaaacttagtaatcatcagcctgtctatctatgtctcctgtctttcagtgttatggtgaagaacaagaaagatttcttaaaattattgcagtggattagataatgacaaaagtggcccttctaggtattaacaatttcccttccttttgaaggtaattttaaagatggaccagtttggaaatggacttgaaattgatcaagctcggctaggaatgtgcagacagcttggggatgtattcacggaagagaagtttcgttacatgtgtattctttcaggttgtgactacctgtcatcactgcgtgggattggattagcaaaggcatgcaaagtcctaagactagccaataatccagatatagtaaaggtaagagtgatttgctaagtgtcatattcaatttctgaagcatttccttaataaaataataaatcataatatggatttaaatattctgttatgcgaataacctatattatattattaaaaggagcaaatgactgaggcactagaactttgccttagcaactaacatatattgggaaaatcatgttttctgcaattggcaaaaaagtagtgatttttaaaacaaagactagtataaagaggctcaaggagaaaatattctagggtaaaattaaactcggagtcttttgacttctgtgctataactctatagtagtggttctcaaactgtttggtcgcaggatccctttacactcctcaagctcctttatggtaatattttttgtttatgtaggcgatagctattgatatttactgaattaaaaattaaaacaaaaatttaaatgtttatcaattcacttaaactttataataaactcattacatgttagcataaatagcatgcttttatgaaaaataatcattttttaaaacaaaaattatgagagagaggaatcatacatttatgcaaatctctttaatgtggcctaatagaagacagctgtgttcgtatacaagttgaacatccctaatccaaaaatctgaaatgttcaaaaatccaaaactttttgagtcccggcaggcaagtgaaaaattccacacctgatctcatgtgaagagtacacaaaataattaaaaatactgtataaaattaccttcagtctatgtgtgtaaggcttatatgaaacataaattgagttttttttcttcttcaccctcttgctgtcagtgtgtggaaacgtaaatggattttatgtttagacttgggccccatccctaagttatctcataacgtgtatatgcaaatattccaaaatctgaaaaaattcaaaatctgaaacacttctggtgccaagcattttggataatgtgtacccaacctgtatctgctgccttattaagcctcatttgataccatgtatcatatatcatctggaaaattctgagactctggacattgctactttgtagtttgtcttaaaaaataaacatcaaagaagctcattttcccccttggatattctctaaacccttaacagtttgcagagcagaaatttcatttttctatttccaggagtataaggcctgagtcctcaggactaagagtgatgtcatgtaatggaaagatctctaggttggaagatagtgtcccaggtgggaataggaccacgtgccttaactagcctgtgactccaggatccgtttggttctctgggccttccctttttcatctatgaatttactatgcaatgtttaggatcctttccagctttaagcatccatgactctcacagaaatcagaatgtcaacttggtttaaaaatatgatctagaaatatttgcatttttttaattctcagattttggatgttctttttttttcctttcttgataaaaaggactttgaagatgaatggataatgtatctcaaagttacacctagaagcacaaacttgatgtactatataactgtatttttttatccttcaaattagtaatagaaaaaccaaagaaaatactagttatgagacttagaattttaagtgatgtaacatggttgtgttagctggtagaattttttaatgtagatgaaagcagttaatgtttcaatccctctttatgaatgtaaatcaatcagccttgaggataatatgttccctgttctttagttgcagataaaatatttttgcatgcattgttaggttatcaagaaaattggacattatctcaagatgaatatcacggtaccagaggattacatcaacgggtttattcgggccaacaataccttcctctatcagctagtttttgatcccatcaaaaggaaacttattcctctgaacgcctatgaagatgatgttgatcctgaaacactaagctacgctgggcagtatcctttctgaaacagaatggtagaatttgtgcatttttcttcaatatttttatggtgatttttttgtgaggcatttagtaaaaagcttgcacattattttttgctctcttttttatagtgaaatctgtatattgttcatttaaattaccatgctagtgaaaattgagaacaactttttgtttataaacccgaggctcatccactatgcatcctgattacttagattgactgacagtagcatgcacagggtccgtcacttacggtacacattccaaaggtggctcttgagaggacctcctcgtggcaagcaagctcgacttatcaggaagagcattctgggcatttgagtgcatcaggagaggatgcccttcccatagccactggccatgtacatgcaggctgatgcagagccctgagtcacttaggtggtggctaggactttcccctctgtttcccttaaaggcagggagtcagtgatggcctgggccctcgtcagaagacaccaactcctgcagagacagatagagactagcaaactgtgtctgctttcagtaatgctgatgtataaagtaaggagactccatttaagtcataaacctatggattttcgtgacaatagaaaacatttttccatcttagtataatatcatttggttggttgttaataaatacatttttccttaatcttgctaatctagatatgttgatgattccatagctcttcaaatagcacttggaaataaagatataaatacttttgaacagatcgatgactacaatccagacactgctatggtaacgttttgatgaccaccctatgaaaacacgttttagttatgtcccgagctgtgattaaaggcaaatcttcatacactaagcttcttttaagcgtttctatatccaggctctgtgcagaatgtacattaaaaacaacttgatcctagagaaattacatgtattagagcataggtatattggttaattttttaaaattaagaagtgactgttatttattatcaaacccttatccttgagcatttcatttgaatataccaagcatttgatgcctttttttctcatctcactccgttcggcttctgtggcatttggcatcattgaagacccaagcctaggaatgctacgggagttaaagctgttttttcactcatgcacaatttaacaaatatttaatgcacgcccctgctgtttctttaaacaatttgctgttttcttttatttttcttttttgagacagagtttcattcttgttgcccaggctggagtgcaatggtgcgatctcagctcaccacaacctccgcctcccaggttcgagcaattctcctgcctcagcctcctgggtagctaggattacaggcatgcaccaccacgcccggctaattttgtatttttagtagagacaggatttctgcatgttggccaggctggtctggaactcccaacctcgggtgatctgcccacctcggcctcccaaagcgctgggattacaggcgtgagccaccactcctagccgcgatttgctgttttcttctgcttcttcagtattgtatgtattccttaagatactgtctcccatcattgtctttctctttgtatttctgtttatcctctgttctcttttctgtttacatttcttccttaggtaagtccttagggctttaatcccatttacgtaaagaactcacatctccatctttactccagtctctcgcctgtgcaccaaccacagaattctcactgtctcttgcgtctctgatttcctgtagcctccaagtctatttataggcaaaactaaactcttcatgtttttaatcaacttttaatcacatttctcttttatttcctacttagcacttattactgtataacatgcttctattcttttctgattctttccaatagaatgtggtcttcataaaggcagaacttggtgatcctcactgctgtatgatatttactatgtttatatgttgagtgaatgagtgttagccacaggtctcttttgttctcacactggaaaacttggaaataaactttggcttccatttcgttgctacatcctcttgcctctttgagttgtccttctggttaacattttcttcttttcccaagcttccagtttaattcttgctcactaatttattcctttactaaacatttatcaagcactgaaacaatgtaattaggttagctagggttctggaatataaagaaaaataagaaatacaggaaaagtaagatccttgcctgtcaaatgcccattgcctaaataggaaggagaagggattctatagaaagaaatgcggtaagtgctacgctaaagaggtattccaggctctgtggaaataaaaagcatgtccctcactccacctaagagaatgcttcctaataataatggcaaacattttctgagcatttgctactttccaggtgctcttttaagcaccttagacatagtaagtcatttactcttcagaaagcctctgaagtcagcaccattctcattttacagatgaggaaacaattagaggacacttaagtaacttttccagctgaccattttcgtaaataggggagctgtgattccaagccaagttctctactgtctgctgaaagagaaactgatgtgtatcctcagtttgcaaggattagtagagtttttcaagatgggtgattccaggctaaaaaaaaaaaaaacaaaaaaagcgtatgtagaaaaaagtgatatattaagggaactcttagattgttcattatggatgggctaagaatatcttagtgtttaccatgtaaaggaaccagatcttgagaaaaaaagaagtgagcctggaaaagatgaccactaacaaactggtgatccattcagcatggaaaagtaaccattactgtaagctgaaataagccaagcctaccaagagagcacaaatctataacgaccctaaaaatgaactttatcagcttcagtgatgtaaaccttacactcaggttgctattcccctattttctaaccttgctccatgtaatacggtagccactagccatgtgtggctatttaaatttgttaaaattaaatacaattgctattttacttccttagttatagtagccagctttcaagtgcttagtggttagtggctaacatagtggacagcacagagcttttctatcagtgcaggaaattctgctgaattctttacttctactatcatatttttatatctagggactctttaattgtacttttttttgaagatttagatgtcatctcttatctttctcagaatatgataattttttgaacgttttcttccgctctctgtaactgctgtgtacctttttcctgtgttgatattttctccctcatggtggtaacttctggccagtcatatttgaaggggccccgaaaagctcatggggaacattgtgtgaatgagtggggcttatgatgttggacttcattcttggatgatgtggttggtaacacattggatttgatttgtgaattctccaatgttggaatgttctctgcacagttacatttttccaaaaagagatgtctgcttagggtatctaaactttggctgtctgtattttgaaagcaggatagggaaagtgagttggggcaggccaggaaagggtagcatggttccttgccattcaatatttagccttttgtttcatctctgttttcagacaaatgaatctatcttcagaaatgcctgctatgtctgttactctttgtgggtttcaaaagttcaattgttctggttctgaaggcaggtagatgtttgttgactgtatagtcaggttggagatggggacacagggtcaaataattctctctttcgttagtcattcccccaccaggggcttctgtaattccaagactttaattcttgagcctttctccaggtttctgtaggtggaattggcttctctttgatattctcttctgcagacaaagtcttttaatttcttccatctatgttctatcttcaccgtggtttagaagtcacagattatctcctaatttttttgcaggttaattttgtgtttcttattgttttgaggaatgattatggaaagaaggagactgaaaagtgctatctttacacagctgaactattgacagtatttatcatttctttctttctttttttttttttttaaatttgagacagggtctctttctctgtcctccaggctggagtgcagtggcaccatcagagctcctgggctcaagcgatcttcagtaactggcatcaagcctcttgagtagctggaactacaggcacatgccaccatgcctggctaattttgtgtgtgtggggggggggtctcactatgttgcccaggctagtcttgaactcctggcctgaagcagtcattctgccttggcctccaaaacttctgaggttacacatgtggagccaccacacctggccacagcattatatatatatatatatattttttgacttgaatatctctttttttttttttttgaacagaatctctctctcttgcccaggctggcacgcggtggcatgattttagctcactgcaacgtctgcctccgagtttcaagtggttctcctgcctcaggctcccaactagctggaattacatgcatgtgccaccacgcccggctgatttttgtattttagtagagatggggtttcatcatattggtcaggctggtctcaaactcctgacctcaggtgatccacctgcctcagcctcccaaagtgctgggattacaggtgtgagccaccatgcctggcctataatttcattaagaatgattcttaagcttttcctttgtctcagaaactcaaaaatagttgacagtgttgagtatgtcccattaccaattgtaatgttatggaatgctaagatggccatccttcatcagctcaaattcctgtcagaattttgtccttctcatagagaaatttctataggaaccataattgtacaccaaatgagttatttttatttatctaaaatttatttagtctggttttctacttgtctatttctctttcttatttagtaaaaccatcagtgggatctaatgccatgagccatactgataaagctatctttttatattcgttccctcaattaaattaccttccttattaattctcaaagggtattctgaataatgtcaccggttttatttatttttatttttgtcctttctttaagtgaaaggctttgattagattctgagttcatgtgggatttttgtcaggtgggattgtaatgattttttttgtgtctttgctaattttttccctttggctgtccttctctgttagaatatcattgacatcctcttagcagatcattgtcttccaaaatttgtagtaattgtgaataacttatattagcattaaaagtgattgctttccttttttgtttgtttgtttttgagacggagtctccctcggctcactgcaacctctgcctcctgggttcaagtgattctcctgcctcaacctcccaagtagctgggattacaggcacacgccaccacacctggctaatttttgtacttttagtagtggcagggtttcaccatgttggcaaggctggtctcgagctcctgacctcaagtgatccgcctgcctcagcctcccaaattgctgggattataggcgtgagccaccgtgcctggctgctttccatttaaaagacaccgttttcctgaccacatttcttcagttgtggtcttatttcttgcaccatttgtattacgaagatttttatttatttatttatttatttacttttaatcttttttttctacagctgctagcaactcttgattttttttttttttttttttagaaatgagctaacaaagttgcttgactctcatcagaagaaaaacaggcctaggaatataagacacatttaatggaaaagtataggaccagcaaagtaggaaatgttattcaaggacagctgtttcatcaacagctattgtttttaagggtaacttaagatgtttatttataatttatgttgatacagaaggaaataaattgattattttctttctgcaaataatctttttccttttccttttctagcctgcccattcaagaagtcatagttgggatgacaaaacatgtcaaaagtcagctaatgttagcagcatttggcataggaattactctcccagaccagagtcgggtactgtttcagatgccccacaattgaaggaaaatccaagtactgtgggagtggaacgagtgattagtactaaagggttaaatctcccaaggaaatcatccattgtgaaaagaccaagaagtggtacgtatttcagttttgcaaaatgctggtgaatattggtcatatttaaagaaatcattgcccaacgcaaagtcgcgaagattttctcctgttttctcctagaagttttatagttgtattagtccattttcaccctgctgataaacacatacctgagactgggcaatttacaaaagaaagaggtttaatggacgcacagttccatgtagctggggaggcctcacaattatggtggaaggtgaaaggcacttctcacatggtagcaaacgagaagaatgagagccaagtgaaagggttttcccttataaaaccatcagatctcatgagacttattcactactataagaacagtatgggggaaacggccaccatgattcagttatctcccaccaggtccctcccacaacacataggaattatgggagatacaattcaagatgagatttgggtggggacacagccaaacattatcattagttttagctcttacattttacagttttagcctgtgagccattttgagttagtttttttaatacgatgtgatgtaaggattatggcttttttttttaatcttgtatatatggctgtccaattgttccagcaccctttgttaaaaagttttcctttccccatttaattgccttggcacagctgtttaaaatcagctgaccacatatatgtggatctttttctgaactctgttattctataccattgctctccttacttatctttacatcagacacattcttgattactgtggctttatagaaaatcttgaagcggggcagtgtaagtctcaagttagttttcttttgaaaagttgttttggctattctgtgtttttcacgtttccatgtacattttagaatttagctttttaatttctaaaaaaaaaaaggtcaggcatggtggtttgcacctacaactgcaacgttttgggaggccaaggcaggtggattgcttgagcctaggagttcaagaccaggcttggcaacacactgagaccctgtctccacaaaaaaaatttttaaggccgggtgcggtggctcacacctataatcccagcactttgggaggccgaggcaggcagatcacttgaggtcaggtgctccagaccagcctggccaacatggcaaaaccccatctctattaaaaatacaaaaaattagccaggcatggtggcacacatttgtaatcccagctacttgtgaggctgagacaggggaatcacttgaacctggaaggcagaggttgcagtgagcggagatcacgcagtgcactccagcctgggcgccagagaaagaatccatctcaaaaaaaaaaaaaaaaaaaaaaaattaagaaagctgtcagctggttattctccaaagctgcagcttctctgctcaaagggtcttactagttcagaatacattatcgtaaaacaaaaaataaatacaaaagaaattttttaaacattagtcaaatgtggtgacgtgtgtctgtagtcccatctattcaggaggctgaggtgggaggatcgctcgagcctcagagttggaggctgcagtgagccatggccacatcactgcgccccagcctgagtgacagaacaataccctgtctcaaataaaaagtaaaaagtctattgagagttagttaaatccatacatcaatttggagaaagtggacattttaacaatactgagttttctgattcattcatttaagtctttaatgctttgtagctttcattgtacagatcttaacatatctgttgtcaaattatctttatatttcgatttttgatgctgctgtaaatagtattttcagttttgttttctagttgttcattgatggtatatagaaataccattgatttttgtacattaatcatatatttgcaaccttgctcacgtcacgtattagttctagtatctcttttgtggactatgtaggattttctatataaatgactgtgtcacctatgaataaagacaatcttgcttctccttttccagtttaaataccttttatttctttttcttagtataagaatctaagcttgttttcttttgaactgcctgatttcaagattatactgcctgacttcaagatttcctatgagccacagtgtgtgatgtaacagtgtatctgatgtaaagataggtaaggagagcaatggtgcagaataatagagttcagaaaaagatccacatatatgtggtcagctgattttgaacagatgtgccaagacaattaaatggggaaggaaactagaatctgtagtacaatattgaacagaagtgctgagaggaatatactaggtattggggaaacgtgggaattttttcaccatagaggatgtttaaaatgaaaagaatgattataattgcttccttctctcttaacttccttccctcagacatctacatcggtgaatgaaatagcaacaataaaaataaaacaaagacttgcaaattttagttcatgcttttatttttcaaatttaagcatagattatacatattcggccgaaatatcctgattccttatgaacctaaatgattttcatgataattatctctgaacctttgtttcttcatatgaaataaaaggtttttgtgtatgttatataagataatatatacttgttatataagaagtacagtgtacattcatcttccttccttccttccctccctccctccttccttccttccttccctccctccctccttccttccttccttccttccctccctccctccctccttccttccttccttttttgagactgtgtcactgtgtcacccaggctggagggcagtggcgtgttcttggctcactgcagcctccatctcctgggtttgaggaattctctgcctcagcctcccgagtagctgggatacaggcgtccactaccacacctggctaatttttgtatttttagtagagacggggtttcaccatgttggccaggctggtcttgaactcctgacctcgtgatccacccgtctgggcctcccaaagtgctgggaatacaggtgtgagccactgcgcctggcctgtacatgttctttcattttcttctgctacaatcaagacacgctgtccattttatgtagctagctcactgtcagcaagtttgcgagttctttatgtcagactaagtctacttttctataactacaacttatcaataggttttgtcccctttctatacacacaaacacaaaaacaaaacaaaagaactagagtaagtttaattcctatttcatgtaccagcccttcagatgatttaaagatagccattgtgacactcctaaatttctcttccaggctattatgttccttggccattcaggttgtgctctggatgtaatataggtttttaagaattgtctagttgttacagtgagtatgattattgaaatgtgatctgcttaccacagaagaaatatttagaattgtggcactgtttcagtcctgtgcttttattattgcaaactaagattgcattcacattcttgcaatctggcattttgctggaatttgctgagttgataattgatatttgccagttgctgttaagccaggtatagttacattttaaacttaaatgtgggttaactcattcctcttacaataatcttaattcattttagttcattgttctgcctgttaatttttttgttcgaatctttgtattttctaataaatgcatattatgtatgtcatctggaaattgatgagtcttaaagttttggttacagtacgtttgcttatataatgtttaactgaatcagagcaagtacagaaatctggagtatatgagacagacttccttttgactaacagttgccagtagtagtcttttaggcctgcgcaattgctgcaaatccccataactaatatacagtagatatggctttgcattgttggctaggatgatatgagagacactcaaatgtcttgccaaattctagatatgcttaatttatggagtccccaaataactatgctaataaccttattgagaaaaaaaaaatgaggttaatctggtgtggcttctgaaagccttgttggggaccctggaacacttgtttttcttcttctgcaaggactcacaattccctgcataataaacagatttaacttttgctggggatcaacatctaatttgctgatacagctttttaaaaatctgtgccttttaaaaatttgagacatctcgtttctggtattttggtaaccccaacctatcttaccaacttcacaaagattatagtagtgtgcacttacacctctgtggagaaggagctgttcagactcagaattagtcaaagtaattcaaagaaccttagtgctgtctctatgtacttacctgtctcagattttaaacttttgttattatttagtcttatgatttattttaataccacagaatacatttgacacacagcaatcttcttgggcctcatagtgaagtaataacgatcagagctacagcacaaattacttacgactatatgacattcacaatatacatcaaaacccagaacacataaaccatgtgtatcaatagctgctggttttattggaacattttaacgattgatcattaaccatatatttacatataaattttcctggagatttttttatattcaaaattagacccttagtataatgaatacatcgccacacaggattgattgtgctctgaaattttgatttgggtaattttaacatgaaattgtataaacaactgatattaaatcttaaactaatgtgtgaaattataaaatagacctaagggagtttttttgaatcatccttatccttatgttttcttttctgaggcatagttttttttttttttttttaaagtccttatttttaggacaatgggatataaactgaagttaaggccaaatctctaagtacaggtgaaacaaagatttacagataattttgtttttatttagcagagctgtcagaagatgacctgttgagtcagtattctctttcatttacgaagaagaccaagaaaaatagctctgaaggcaataaatcattgagcttttctgaagtgtttgtgcctgacctggtaaatggacctactaacaaaaagagtgtaagcactccacctaggacgagaaataaatttgcaacatttttacaaaggaaaaatgaagaaagtggtgcagttgtggttccagggaccagaagcaggtatagttatgtctccagaatgttgattgtctgttgtattatgtactctgttggtatttattttgtctttttttagaattaatttatttattatactttaagttctggggtacatgtgcagaacgtgcagttttgttacatgggtatacatgtgccatggtgatttgctgcacccatcaacccgtcacctccattaggtatttctcctaatgttatccctcccctagccccctaccctgccacaggccggggtgtgtgatgttcccctccttgtgtccatgtactctcattgttcaactcccatttatgagcgagaacatgtggtgtttggttttctgttcgtgtattagtttgctgagaatgatggtttccagcctcatccatgtccctgcaaaggacatgaactcatcgttttttatgactgcatagtattacatggtgtatatgtgccacattttctatacccagcctatcattgatgggcatttgggttggttccaagtctttgctattgtgaatagtgctgcaataaacatacgtatgcatgtgtctttatagtagaatgatttataatcctttgggtatatacccagtaatgggattgctgggtcaaatggtatttctggttctagatccttgaggagtcgccacactgtcttccacaatggttgaattaattcacactcccaccaacagtgtaaaagcattcctatttctccacatcctctccagcatctgttgtttcctgactttttaatgattgccattctaactgacgtgagatggtaactcattgtgggtttttttttttatactttaagttctagggtacatgtgtacaacgtgcaggtttgtcacatatgtatacatgtgccatgttggtgtgctgcacccattaactcatcatttaacattaggtatatctcctaatgctatccctcctccctccccccaattgtggttttgatttgcatttctctaatggccagtgatgatgagccttgaataaacattgagtctagagggaagcaggtgtagaacctgccttaatctgattactgtcttatcatgtattgtcttagttctgacataaacccctttaacttctagtactttcgtaatctctccgtacagaatcagaataaaagaggattgtagcccctattattaattttgctttacagaaattgtttttttggggagttcccttccccctcttttttttctacttttttgttttctttgagggcttcatacaattttgcaaagtattttcagaaatatattctaatgtagatgactgtggagctgtaatattaattgagaacctgatgccatgctaggtgctatagttcaaaaatgagaaagacagtttttgtttttcagaagcttgtagtccagttggaaaaataaatacataaaaatctttccatacagtatggtgagtacagagataaaggcatgaatacggtgttttgagggcgttcaaggggcatctaatgctggggcaatggttggaaagggtaagaaggaagggatgagtgttgggtgtccctgcctaggtttaaatgacaggtgaagcaggcaaagaccggcaccaagtaccttcccagtacagtcagacagcttgaggaaaggtgtaaagatggggggcagcatggggctcaggacaactccttgctgtctgtcagtgctgtgatgacctctgtcagaattcaagctggggaaagatgggtggtgaggggagcagaaataggcaggagaccattcactgaaggcttgtatgccaacgtgggaacttttagtcttctttagaggcgatagaaacattgagagggtcgccgggcacgatggctcatgcctataatcccagcactttgggaggccaagtgggtggatcacctgaggtcaggagtttgagactagcctggatgaaatggggaaaccccgtccttcctaaaagtacaaaacctagctggacatggtggtgtgcacctgtagtcccagctacttgggaggctgagacacgagaattgcttgaacccgggaggaggttgcagtgaaccatcatgccactgcagtccagccagggtgagacagtgcaagactccgcctccaggaaaaatagaaaagaaaagaaactttgagagggttttaatcaggggaggtggtgtatgatttgatctctgttttagatcaaccattctgagcgccctgtgaagagtgggctgaagagggccacagatggggcacaaggaccagttgggctgttgccatagtccctgggagcaatcatgagattgtgaagagtcagtttaatttgtggattaggaatttagaacctggagtcaggcttcctggaatcttgttgtgttcattgtgagatgtgtgacttgacaagttaacttctggatacttcagttctctccttttaaaaattgggactaacaattataacagccttagggccgatgaaaggattaaatgagttactatcagtaatgcacctaaagcagtgccttatagatagatgataaacatacagtaagtaactcgtattatgttgactttagatggtggtgccacaacatgaaaaaggaaatgtaagtgtcagaagtgatctaggcatgatagagtaacactaagagagaaaagttaccagctcctgtattccactagaagacttcgaatgaatagtctttgtttttcaagttttttatttttttatttttatttttacttgagacagaattccactcttgttgcccaggctggagtacagtggcgccatctcggctcactgccacctccgcctcccgggttcaagtgattctcctgcctcagcctcccgagtagctgggactacaggcacccgccaccatgcccagctaatttttatgtttttagaagaaatggggtttcaccattttggccaggctggtgtcgaactcctgacctcaagtggtccatacaccttgtcctcccaaagtgctgggattacaggcgtgagtcaccacactctgccctgtttttcaagtttaataaatcaggcagcagtcagctttgtctaaccatgatgatgggagaagagcatgaaagaatgaaccactggtagtttcttagtctcacctcgggtgatgtttcaaacccttctcccatggagtcttctcaaggaaacagttgcaatacaatatgattaaatgatagttttgattcgtcttttgctagtcacccttgttaaaggtgcttgttaacagtggaatgatgaaaaattggccacaaaactggaacagtgttctagataatatacactgattgggccggccgtggtggttcatgcctttaatcccagcactttgggaggccaaggcggtcggatcatgaggtcaggagatcgagaccatcctggctaacatggtgaaaccccatctctactaaaagtacaaaaaattagccgggcgtggtggcgggcgctagtagtcccagctgtttgggaggctgaggcaggagaatcgcttgaacccgggaggcggaggttgcagtgagccaagatcacgccactgcactccagcctgggtgacaaagcgagacttcgtctcaaaaaaagaaaaaaatacactgattaaaaagttctagaaagttgacttctctcacttggaacagtttttctagcttggttttgtttttccgctggggtgagagtagagtgtccctgtgctgctgcttcatgttgagctcttctttggagacaacaaatgagaatgtttgtgtgtctctacagggctcgcctatttagtcattatagaagcttaaggaagtcttcaagtttgagactgtacatcgctgctttatgtagtttagatgtttcactagtaacttgttcagagggtgcattaagagatacctagagaaataatttgttttctctgtcagctttctgtgagaaataattatcaggagtaagtcagtctttgatgtgtcattttatggcttacattatacagcaacatctgataatgactagacagggtataggctcacacctataatctcagcactctgggaggccgaggagggtggatcacctgaggtcaggagtttgagaccagcctggccaacatagtgaaaccccgtctctactaagtattcaaaaattagctgggcgtagtggcagatgcctgtaatcccagcttctcggggggccgagggaggagaatagcttgaacccaggaggaggaggttgcagagagttgagatcgcacccctgcactccagcctgggtgacagagcgagactccatctcaaaaaaaatttctttttaaattaactggatattattaaattagttttcaaagttaattttcaaggtaattttacatgtttttctatttctcacaacaatattatgagatacataggattgctgctatcttctctatttgaggttaagagattgaggctctgagaggttaagcattctcaaagttgtacagttagtactggtgataggaagattcctagtcacagttgatataatggattggaagcggcatacaatccaataggcctggatttgaattctcactctgtcatctttttagttgagtcgtctttcacacactgttcacctccctgagcctatttgtttataaaaaatggatgattatatacataaggctgttgtgaaggtaaatagaaactgcgtgtcaagcacctgccataatgcctagtcattaatatatgtgcaagcattcattaccactcctctccttttaattgaatgcaactaaaaggagatactaaacatgtaaaacgttgtcaccaatttgcctgcattttggaagcctgttttaagtcttaattatttttattatgtaggtagttatcacagaaacgtgccagttttatctttcgagatctggaaatacaagtcaattaagtaacagtatgggccagttgggaggaagtagccatgaactgggaagggttctgagttttacttctgtttgttgctagccaagtaattttataaccctgggcattgtcactatctcttctcttgcctgtgaaatgatatgtaggagaatacttgggcatcataggaattgccgttgatttaaaaatgaatttgccgtcctatctaggagctcatgttttctgcttactgaaaagcctagtaagagcttttcttccacgtactgcttcctgccccctccccatacaactaatctagggatttggtgaaaggatagaaaggatttttactctctagcatttagtaaatattctgttcattatcttggatttgaactaatgcctattaaggaggtaaattctctttaagttttttatttatctgatcatgtataataggatatttgttaaacctaaaaactctctttgcctcctcaataatgatactgatctttcattttcattggaatttttttttaaagctgctatactgaataagtaatacctctttagtaatatggaatttatgattgatttgaaagaaagtcttaacctgtatatttaaaagagtatagaagtttatagggtatataacaagctggtagattagtatactactgcaagttcctagatgatataatgctaggaacaaagctaagatgaagggtaaatagctaatttctttaattttgcttcctacaaaatatgagagaatagttgtcaattgtccttttggttgcatatttctatatcttttcatgcgtttgaccatgttttagccccatcctaggtactgtggaagatacaaagacatgggaagtacctgccctcacagagtttatcttctatttgagagtttaaaagtttagggaaagaacacctatatgatgattaggtataaataaagtacagaagttccaaatacatgtgtatatagaagactgcttttagaaagtcctctctaggccgggcgctgtggctcacgcctgtaatcccaacactttgtgaggccaaggcgggcggatcacctgagatcaggagtttgagaccagcctgaccaacatggagaaaccccgtctctactaaaaatacaaaattagccagcatggtggcgcatgcctgtaatcccacctactcaggaggctgaggcaggagaattgcttgaacccggggggcggaggttgcagtgagccaagatcccgccactgcactccagcctggtgacagagagagactctgtctcaaaaaaaaaaaaaagaaggaaaatcctgtctaaaaattcatcgtataaatagaattctaaatgtgtgaatgttggcataatcaaaatttgaattttgactaaaatttaagattttttatgcctttatgaaattatatatttatgagacttttttcaaaaagaaactgattattccattttgaatcttgacaccccttgagaaaactctaaaatactcatacttacttattgtttctattgctttttttattaggtttttttgcagttcagattctactgactgtgtatcaaacaaagtgagcatccagcctctggatgaaactgctgtcacagataaagagaacaatctgcatgaatcagagtatggagaccaagaaggcaagagactggttgacacagatgtagcacgtaattcaagtgatgacattccgaataatcatattccaggtgatcatattccagacaaggcaacagtgtttacagatgaagagtcctactcttttgagagcagcaaatttacaaggaccatttcaccacccactttgggaacactaagaagttgttttagttggtctggaggtcttggagatttttcaagaacgccgagcccctctccaagcacagcattgcagcagttccgaagaaagagcgattcccccacctctttgcctgagaataatatgtctgatgtgtcgcagttaaagagcgaggagtccagtgacgatgagtctcatcccttacgagaagaggcatgttcttcacagtcccaggaaagtggagaattctcactgcagagttcaaatgcatcaaagctttctcagtgctctagtaaggactctgattcagaggtaagtcaaatcctgaaggctttgttttcaaatttatatgtaagaaaaaatagattgttgctcaaactgaggaaatttttcctacatgtgaatgacgagctatattattttttcattctaaactctactgtgcagaaagttcacattttattcatttgaaggacttctctgtatctttcacattttaaactgcaatacatttaaattaactctgtatatttcctgaatcactgtatgttcgattggtgagtatctcaaggggtgccacagttaaaaccgaggcagagtgataatctgtgaaatgaaaaattattatcaatttactgtttaaatccttaatatgctcttgaattcagataacatttaagaccttgtaaggggccaggtgcgatggctcatgcctgtaatcccagcactttgggaggccgaggcgagcggatcacttgaggtcaggagtttgagaccagcctggccagcatggtgaaaccctgtctctcctaaaaatacaaaaatcttaggcaggcatggtggtgggcacctgtgatcccagctattcgggaggctgaggcagggtaattatttgaacctgggaggcggaggttgcagtgagccgagattgagccactgtactccagcctgggggacagagcaagactgtctcaaaaaaaaaaaaagaaaaaaaaagagaccttataaggaaataaccctgttaatgcaatggtattcatcttaagttttagtacttcagaaatatattttcatttactcttcttattccttctaaatttctccttatgacaaaacaaaacagtaacacaggtgtgcatactggtctagaagactgtctgtttctcttcctatgaacgtctttatctcgtctttttcatttctgcttcatactgcatcttctcttactgccacttgggtaccacggcagtggctatcttgaacatctttcataaaaacatcactgtcaatttgtgaggatattaagtctgctgagctcctttggggttatcttttttatatttccagcatgcatcttactatttcatttactttggaagcgtttagccatgttttcctgagaagccttatcagttcacactgtaggctggtagaactccacattttgtcttctgggctaacctttttttatgtactaatggttatagaaatgtgaatcctcctcccctagccatgccccactgaaaataaacgaactgaacaaaactaggaataattcattaagtcctctctcttgctgccagatgtagtaaactcctactagaatagttaattctcaaagaatctgatgctgacagttgacatgaaaatcatataatctttctttgatggagaaaatgtttcagaaagctgtgaaacattggggcatcattttgaatatcagtttttatcctatagttcagaagaaaatgcttcaatatttgagccttctgtcggtagttcactgtgaaaaacaacaaccatagattctgtgttgagttcattgaccatatttgaggttgaagtcttcttaggaccttccttgtgatcttcaggaagtgatttagcccagagtcaccaatactgttagctatgagcaaagaatgttagagtttctgtaaggtataatacaagttaatggagtgcttttcactattgggttttttattgctcttttgttttgttttgtttttttgttttttaagtctgctctgttgcctaggctggattgcagtggtacaatctcggctcactgcaacctccacctcccgggttcaagcgattctcccacctcagcctcccaagtagctgggacaacaggcatgtgccaccatgcccggctaatttttgtatttttagtagagacaggatttcaccatgttggccaggctggtcttgaactcctgacctcaagtgatctacccacccaccttggcctcccaaagtgctgggattacaggcatgagccaccgcccctggccttactgtcctcttttatttgactttcatgggaatgcagattataagggaactctccatctatagagaagtcttatctgatagaattgggggcagaaaggtctgaaagtcattgctaaaggtgaagtgcatttaatacaatgctactccacttgaaagtggatgcgtttttttctttttaaagttgaacgtgttacatgattaaaagaagggatggagctgcaccagttcaacttattttagctagtaagatgaaaacttaaccacacgtgcgtaacgcagcgtttttacattaggagactcttgttttatctgactcagcattttaacatcctcttctaacagttcagaaaagactttaattttaaatagatattttatataatttacctctccagctgaaacatcttgttagcttcttcaatgaaattggcaaatatcatcctttccatattattcattttcttttattaattctatcccatgttcttatttatcttccattttgttgaatattagtttgttgtcataaaaattctacagtaaaaatctaattttattttattttttgatctggggactctaggaatctgattgcaatattaagttacttgacagtcaaagtgaccagacctccaagctacgtttatctcatttctcaaaaaaagacacacctctaaggaacaaggtaaaacatttatttaattttttttttaatttcagaagcggtgtatgcttacaactagaaaatgagaaatacaagcagaattaaaaatcaaaatacctgtagtctcatttatataaaaatgtctactttaaaactttatgcttgactgtaggtgtttaagttgtgaaacttattttctcttgcagtgtatatgaaagatcactttccaagtacttttagtcattaatgtaatgactttataatatgcagttgtataggtttggtcaatccccttatttttgtcatttaccctaaatttttttgctctagcaaataatactgcaaccaagatcttgtggataaatatttgaggacatgttcttgattagtttgtaaggatgaattgcatggagtggtattactggtcccaaggcatgtatgatttaacattgatacatactgccaaaaggccttctagaaactgtgtacccatgataaactaggtttgttgaatcaaaatatataaatatttgtgttactacatagtaaagcatattttatatattaagcacgaattaaagcatattttatatattaaatgttcttgttcatcagtataaaaacaccatttcctaacttaaaagatggataaaggtcataaacaggtcacaaaaggaaaagtaccaatggttgattaatatgtgtttaacctcatttgtttaaccgtatgtttaacctcattagtaatcaagtagtgcaaattaaaataataaaatagtttcttgcctcttcatatttcaaaaaaatgtttttaattatactcattttttatgagagtatagtgagataatcacatgttttaaaaagtaagtattggtctgccatttctagaaaaaaatttgaaagagttcaaataatttaaaccagtaagtgcattctagaactttagcctaaggaaacattgagaatttaaatacaagaatacttaatactgcattggttataatagtgaaaaattggaaataacctaaataacaataagggagtgagttattaaataatcattggttttagctcttactggtagaaatataggtgaatttttttctgttctttttcttgtgtttttctaccatgagcatatattatgtttctagtagcataaaaacttcttactttttaaaattttaataaatggccctggctatccatttgaaagaagatgtagtctcacacaatataaatgtaaattctactgtagtcaatatgggttgctataacagaataccagaaactggatttgcttaaatgataaatatttatttctcacagttctagaggctgggaagtccaaggtctgagtgagagcccacttcctggtttgcagacagatgccttctcgctgtgtccttacatggtagagggagagaatatctcttttgtacctcttcttaagggcactaatctcattcatgagggctctactctcatgatctaatcacctctcaaaaatcccaccatcacattaggagttaaggggttaggacttcaatatgaatgtgagggagacacaacattcagtccacagcaaattccagtacattaaagatacaaatatgaaatatgtaaatatgagattattttttaaatttttgagcaagaagttttttgcaatcatatctactaacttgaaaagacattcattattagtgaaaaggaaaaatatgttattaacaatatgtatagtgtttttgtttaaatactttaaaatattcatgtacacatttgcatgtttgtggcatcctattaagaagtctggaaagatacatgcagaattatttacaatgatggatagaactggagatgtagaaagtacttttcctgaaggagttatgtctagatagtaaaccatcatattattattattattctcagacatttgcattgtcagggatttaactaccacttctgttttggtgacccttcaggtgagctctccctgatacccatctttaatacctaaaatcaaactcgtgtcttttacctctatttcttctcggaacgttttttgttttatctattaaataaaattatattatctgccacttagtttcaaaatcctaaggttgtcctttttcttgataactgtcagtttgatccttctacagcagttagagaaaaacaaccaaacatcgatacctctccaaattctaacgtttatttctttgccttcttttttctccctcactttttccccatcacaacacatatttaaggatttcatctttactgtgtgaacctttattttgttttaactttttcattcttcctacacacactgccagattcatattgtaaaccttttttaatatacctcattcttactatcttaagaaacaataacaaaacttcattgtctccattctgtccacagggtaaaaatcaacccttagtagaaacagcctaaatgtcaatagaggtttgtttaagtaagttatggcatatatatacaatgcaagaacaggcaacctattcaaaataaaattctatttcctgtgaactgaaaaaaatctctaagttacatcattaagaggaatcaagatatattaagtgagaaaaatgaagtgcacaacaatgtgtactatgctgcctgtgtgtgtgtgtgtgtgtgtgtgtgtgtgcacgtgcacgtaagtcagtggatgcataggaagctgggagcagcaattgcctctggaaagggaggcagcgagagacattcattttgctctctgttcctttacaaaagagagaacttttaaattttatgccaggtttacatattacctgttaaaataatttatgatgacttctgtaatagacttttataaatagcacatttttaccattgctcatgggttattttgttcttatgtataaagaatagtttggccgtgtgtggtggctcatgcctgtaatcccagcgctttgggaggctgaggcgagcagatcacaaggtcaggagatcgagaccatcctggctaaaacggtgaaacgccgtctctactaaaaatataaaaaattagcgaggcgtggtggcgggtgcctgtagtcccagctactcgggaggctgaggcaggagaatggcgtcaacccgggaggtggagcttgcagtgagccgagatcgcaccactgcactccagactgggcgacagagtgagagtccatctcaaaaagtaaataaataaataaataaataagtaaagaataaagaatagcttgaaattaaagttagttgctttaacagaatggtcttaaaatgggtgtttaatcttcaggttcctgggctatataagtccagttctgcagactctctttctacaaccaagatcaaacctctaggacctgccagagccagtgggctgagcaagaagccggcaagcatccagaagagaaagcatcataatgccgagaacaagccggggttacagatcaaactcaatgagctctggaaaaactttggatttaaaaagtgagttgccttgtttcttattctgaaacaagataaactgttattttctgtaatttccatccctttctcccaactcttcctagtttcgtatgagtttttgtttctctcactataaaataattatttttctctcttccctttagctaactctttatacttaatatcaatttctataccttcttttcataaaaagatggcaaactaaaaaccagttttcagtctggttttggagtctctctgatgtgaagcaaattgctttcctaggccttaagtctcctgccttccttttcttatctctcaggattgtaaagagaataaaattttatttggttttttgttttttgttttttgttttttgtttttttgagagagttttgctcttgttacccaggctggaatgcaatggtgcgatctccactcaccgcaacctccgccacctgggctcaagcaattcttctgcctcagcctcccgagtagctgggattacaggcatgcaccaccacgcctggctaattttgtatctttaatagacacgaggtttctccatgttggtcaggctagtctcgaactcccaacctcaggtgatccacccgccacggcctcccaagtgctgggattacaggcgtaagccaccacgcccagacaagaataaaattttaaagaaggggtagaaacacagtgcaatatcgtacttctctaatttatcacatctaaaatggggagactcattgagtttatatgatgaatttgccagatttgcagtgtatgtggccagcactgttttaaaagaattcatcttctatatagttaaatttttgttaaccataatacttccttctgttagaccacaaaattagccacagagtagcattaccttatagctattttcttgttctcaataaaagaaatgtgctgtttaataaaagttttttttaattatatggaatgataggattaaaccttacctagtagaaatattgtcatagatgaggcggtatgagtgggaaacactttgtaaataagtaagtgctggacaatcgtttcttattttacattgtgtaaagtctaggattaaaccatatgacagcagttttcaaactttttcttttcaggaatgctttatactcttagaaattattaaaggccccaaaatactttggtttatttaggttatatttgtcaacacttaaccatcatagaaattgaaatagacattttaaaatatctattttaaaataatgataagcctattacatgaatgtagatagtacatttaaaaaataaatagctatattttccaaatccccccaaaaggtaagaaaagtggcatggctttacatttcattttgcaaatctttactatctagtttgcaaatctttactgtctggcttaatagagctcagccggattcttgtatctgcttctacatttgatctgttatgatttggtgttttggttgagtatatgaaggaaatagacatatttgtagttagaaaatatatactttgatagcctttttagatagtggtaaattttcttctttgctgttatgtctaaatccaacaacttgtagtttctttaggtcagtgatagtgtagaatatgaaaccatatcaactgactttttgtactctgtgttttattgcagtccactggtgtcccttttttctgttgcctaggctggaatggcacaatcatggctcactgtaccctcgagctcctgagctcaggcagtcctcctgcctcagcctcttgagtagctgggactacaggcttgtgccaccagccccagttaattatttaagttgttatgtgaggtgtgagccaccttgcctggcctacactggtgcacttttaatgcatcttttacatgtaacatcatgagttggtcttttggaaaatattggttaattgagatgtacttccaaatattgatatattttattatacaatataagaaaaaagtcacaatcaacaaagcctttaatattggaaaactgttgtgtggcagatacgttttccaaaattttaattttcatttgaaagcttgaattttatcattagcaacaaatactcttagttgtttttctttaaagtaacaggctctctttgctcattttatttgtttgtttatttatttatttattttgagacagagtctctctttgtcacccaggctggagtgcagtggcacaatctcagctcactgcagcctccgcctcctgggttcaagtgattcacctgtctcagcctcctaagtaggtgggattacaggcgcctgccaccatgccttactaatttttatattttttgtagagatcgggtttcgctgtgttggccaggctggttttgaactcctgacctcaagtgatccacctgcttcaacctcccaaagtgctgggattacagacatgagccaccacgcctggcccctttttgttccaaattttagagaagtcctgaatgaccttagtgtcacacatgcttttacttgaggtaaactatcatacttccatacacaatagaagtgttttgtttgtgctttccattttgtcacagaatattaaaaagtataccaaagaattagctgagcgtggtggcatgtggccgtagtcccagcttctcaggaggctgaagtggcagaattgcttgagcccgggaggtggcggttgcagtgaactgagattgcggcactgcactccagccagagtgcaacagaacgagaccttgtctcaaaaaaatttaaaaaaaaatgtaaagtataccaaagggttgagatttaataaaattaatgatttgtactgcttccatcaagaacatttttgagacttttttttaactgcaagtgcgcagaggtggagaatacaaatagtcctggtatgactcgtacggtgtgatgccactgtcttgattcacactgagttgtcagcagtttcactctgttctgctttagcaacatccatgcaagggtcagcacagtggaaaggatgaacaaagtctgaatattgtaagaatagttttggtcttggaaaccgttcaaaggatcttgggactctccaggggttgtggaacatgctttgaaaactgttgctagacagaaattaagggtgcaacagtattcttaaatacctttgagaaaaaaagatgtactggtatttaatttttgttgacaggagatagaattacctgtaatatcttcataacaggattaatttttatagatagcttccttccagaaaagaaaaaagagaaaacaaccgagaggggaataaaagacagggcttaggccaggcacagtggctcacgcctgtaatcccagcactttgggaggctgaggcaggcagatcacttgaggtcaggagtttgagaccagcctggccagcatggtgaaaccccatctgtagtaaaaatacaaaaattagccaggtgtggtggtgcacgcctgtagttccagctactcgggctgaggcaagataatcgcttgaacccaggaggtggaggttgcagtgagccaagatcgtgccactgcactccagcctgggtgacagagcgagaccatctcaaaaaagaaaaaaaataataataagatttaaccagggcttaaccatttgttcctgcttcacttatattagttcttaaccagacttgagaagggcactaaggagaaaagaattaaagtattggaatcattctgccttagctaatatatctagtggtggcccagcacctacactgaatagtgattttgaaagcaagaagaggcactaagaagtgagactcagaatgtattgggagtgctcacaggagaacctgattgtgttatataatgaattgaaagagatcgtacagtaaagggtcttatcctcttcatgtccctctattttgtccaggtagaatatttcttctctaataatcagtaccttaaaaataccaaatgtattttattgtattttgcagagattctgaaaagcttcctccttgtaagaaacccctgtccccagtcagagataacatccaactaactccagaagcggaagaggatatatttaacaaacctgaatgtggccgtgttcaaagagcaatattccagtaaatgcagactgctgcaaagcttttgcctgcaagagaatctgatcaatttgaagtccctgtttgggaatgaggcacttatcagcatgaagaattttttctcattctgtgccattttaaaaatagaatacattttgtatattaacttta

SEQ ID NO: 92 - DNA, 73169 bp, Homo sapiens
tcttgttgttacgggtaacggaagtgtggcggcgttgggttgagcgggctttttggaagtttgtggcggaggtgaggccgaggtgactgcagagcggctcgcgaggtgctcgggctgtgggactgggcccctgggagggagcggttctgtgggggaaaggaggctcctgtcctgacttggcgttctggtattttctctggcgtggaaagtaggcgcgctccgctgtctcccgccgcctgcctcagctttcgcggttccctcctaggggtgtgcctcagtcggagccccttctgttaaattcttcccccttggccgagggtgagctcttacttctgagaaatttcccttaaccttgctttgcatttgttgtccggtcgcggtctccatcaccagctgcttcgtgttatagtttttgtatttgcgctcacggcttgttaactgaagaacccggaagggaaggccgcggcgtttcccgccggcggggctctgccattctcggatcttggcttcagatctctgatgctccccagcgtctcttggcaaggaatctacttcgcgttcagggaattcacagccacccgcctctggtcttacctctggttttaggatgattttagcaaatgtgcctaggttgatttaaacgtatccccctccgaagccgcctgccccttctggctggacacctttttaggttggtgtgtcctgtttgcatccggtagttcaaagcatgggatcttggagtccggagctggacagactcgggtttcacttctctctctgccacttggtagccttctaatcttgggggaaattccctaatctctgaatcccaaaagttgttcatctaaaatggggctaatattacacctacctagtaggtggtgttgtgggagtcatgttaatgaatgtaaagtgctgggttcagtgttttccctattataggggttcaataatttgttcaacaaacatttgttacctagtttgagctaggtactgtgctaagtgctggagatacaatgataaacaaaaccagctacggcccgtgtccttaggggacttatagtctagtgggagataacatttgttaatctgataattacacatgtaatattaaaaattggtgacagtatgtaagagagtttactggtgccatgagaggatgtactaggggaacgtttaacaacctatactgagcttttcttttcttttcttttcttttttttttgagacagagtctccctctgttgccaggctggagtgcagtggcgcgatctcggctcactgcaacctccgcctcctgagttcaagtgattctcctgcctcagcctcacaagtagctgggactacaggtgcgtgccgtcacgcccagctattttttttttttttttttttttttttttttttttttgtatttttagtagagacggggtttcaccatcttggccaggaaggtctggatgtcttgacctagtgatccgcccgccttggcctcccaaagtgctgagattacaggcgtgagctactgcgcctggcctagactgagcttttgaggagatgtggattgagctaagatctgaaggatttgtaggaattagtaataaaagattggggggcagtggatggaagcaggaatatttatttaagttccagatggaaacatgtggaagggcctgtggcagaaagaacttggagatttgaaggactggaagcaattctgcatggctggagcagagtgatgaaagggaggtaggcatgggtcagaacttgcaggacttattttatccttacttaagggttttggactgataaagcaatggaagccactgaagagctttaagatgaggatggcatggagggaagataagtcacataatcaggtttgtgtttcaaaaacatcactttagttgctgcgtagaagggaacaagttaggaaacgattgcagtagttcaggtgagagatggtggtggcttggggtaatgtgtcagtagtggagatggagaaaagtagacagatttgggagatatttagtaggtaacattgacaggacttggtaatggatgtggtgaaggatgaaggcaaagttgttaagaatgttacctaggtttctggtctgagcagctgagtggatgatggtaccatttatggagacgggaaacacaggaggaagaagaggaggaacagattttctttctactaggctgtacttcccccttctattttcatagctactcactgaattctatctgcttcatgtgcctccatttcatcccatcttttctgttctccagtcaccaccctagtacaggtctttatcatttccactaaaataacttccaaatggtctcttagcatttgctgtttcttcttaccttctccccactttaatctgcacaaagatgctaggttctgtttcctcaaacacttgcaatcttgtgagattgtcttttgctcaaattttttaatggttctcagtaatttacgaaatagaatctaaattccttaacctgtttacttccagcctatctttccagacttcctactcactattttcctacttggattctacctcagccattttactcattttcccccaaagaaatttctcatttcccgtatgaatgcctttgttcatgatacccttctccataatgtatacaacctggttgtctggactacctatatttaatctctaagttccagttcaagctttcctctgctgcgaaaccttgacatttaagaacacagttacatcttttaccttgttaacttctcagcttttctttctttctttcttcctttcttttttttttttttttttttgagacagagcctcgctctgtcgcccaggctggagtgcagtggcgtgatctccgctcactgcaagctcctcctcccgggttcacgccattctcctgcctcagcctcccgagtagctgggactataggcgcccgccaccacgcccagctaatttttttttgtatttttggtagagacgggggtttcaccgtgttagccaaaatggtctcgatctcctgacttcgtgatctgccctcctcagcctcccaaagtgctgggattacaggcatgagccacggtgccggcctctttttttttttttttttaagagacagggtcttaccttgttgcctaggctggagtactgtggcatgatcatagctcactgcagcctcacactcttgggctccccttctcacttgtttttataccatttaattggcacatagcatttatagtgctattggtttattcatttatttgtcaaatactttattacatgcttatggtaatatataatgtattacatacttgatatgctgttaaatggaagctttgttctaggtagtatggtgagtagatggtaacaagtgtgggcaaaaattatgaaaccacttgattagaatacagattcctaataaggcaattccagggaattttcaggattattttggttaggttaagaatcatcttgccactgagcttaagaagaagaagaaaaaagaatcagctacttaaagatagtcctaagtttgttgagcacccattgcataataggtatgaaatattcagttaacagggaaggaaaacaaatcaagtttgtttatttctggaatcttcacccacctctgacgtttttcccttgtagttctgtgatatgagcaacaatggaccagaagattttatctctagcagcagaaaaaacagcagacaaactgcaagaatttcttcaaaccctgagagaaggtgatgtgagtattaggaagcatgttctgctaaaagtaaatgtcaggcatgatgacacattcaaaggacatgtgagaaagaaaaattacgctgcttcttcatctactccccattcactgtaggagacaaggatttatttaataataatttatagatgtaaagaaattggggtgagggaatgagagaaatagactacttgagggcatttgtgaccaagtttaaacctgaaatagtttaagaatagaatgcttttacaactgtatttataaaagcaattagtatacttttatggtcctcagaacaatcctatttgatgataatatccagactatagttactgattgagacattagttttgcattttgatgcttctctgtatttttccgtaaagaaattaagtttataagcggcaaaatattttgaaattattagtaaaaattagggcctctgttttcactataagtgtaggattataaaatgggatagtaattgccttatatgttaggctgtttcttctccctaatgttctttctcagctgatatactgctcctttttccataagtgatctcatcctatccaggtccctgcctggaaaagaatccctcttcaaggtatatgtacaaacaagtaaagacattgagtatcatgggatttttttcctttttctgtcaattgatgagtattatgtttttaagggaatttctttgtgttaatgttgtagttattgaaggaaggtgcatcttagtgtgtgttatctgacatactaactaggaattgatgcagtgttgctctttgatttttttttctttgaaattatccaagattgcctttatagctattttttgagatgacttgttgcatgagttgtaacttgaatcattctatagacaagatttgattgaaactagcatttaaattatttatttaaagtttcatgcctcaaattgaaggcgtgaacactgtcaaattgaagacagtgttccagatgttttctgactctaggatagagtaatgctaatatttccctcatttttccattaatgcaaaatcagctttttggcagcaacattatattgtagtctcattgctcttatatttatttttgtatatgttgataagttgctaagtttcctttatctctgaagtccttttagaatccatgttaaaaactatatataggccaggcatggtgacttacacctgtagtcccagcactttgggaggattcctttaggccaggagttcgagatcagcttaggcaacatagtgagacccagtttctaaaaacaactaccaaaacaacaaactttatatctgttaactgtcaccttttttagattcatcttgttttactccatcaagatcattttgtatgattctgctgaccgtattaatcagctttttatcctctacaaatttgttaagcatgtcagtaatatatgcaggcagttcatttgataaaatgtcccacagaagatgaactcagagtaaaaaattataaaacacataaagaagtcctgtggcaagaaagactcaaacagaaatgggaaaattcatattcaaggatttagagcaatctgaaaaaaatctttaattatttaacacaaatacttaatacagtatttaactttatttatttaaaggtgggatctcacccttgcacaggctggagtgcagtggggcgatctcggcacactgcagcctcaacctcctgggctcatgcgatcctcccacctcagcctcctgagtagctgggagtacaagcatgtgccaccatgtccgactaatttttgtatttttagcagagatggggtttcgccatgctttccaggctggtcttgaactcctgagctcaagcaatccacccacctcagcctcccacagtgccgggattacacgtgtgagccactctgcctgacctagtatttaaaatatttgaagatgtaaatgaaggaatagaactcacaaaataagggatggatttagaaaacaatgaaagacaacttcttgaaatgaaaacctcagtaggtggtttaacagtagacaaaacattgctaaagagaaaattagtaaagtggaatacagagctgaggataactaaataaagcacagattgtaaagaggtggaaaatataaagaatatttaaaatatatgcagagaactttgataagaatatattatcttcttaaacacatagaatgttcataaaaattaatcacatgtcatatactagagcacaaagaaaacatgggtaggtcccataaggtagaattattacaaactattctctgtgatcacaatgcaataaaactggaaatgaaaaccgaaactaaaagtcaaaaagcaaagacacttttacttggaaattaaaataccttctattcaaccattgtggaagacagtgtggcgatttctcagggatctagaactagaaataccatttgacccagtgatcccattactgggtatatacccaaaggactgtaaatcatgctgctataaagacacattcacacgtatgtttattgcggcactattcacaatagcaaagacttggaaccaacccaagtgtccaacaatgatagactggattaagaaaatgtggcacatctacaccatggaatactatgcagccataaaaaatgatgagttcatgtcctttgtagggacatggatgaagctggaagccatcattctcagcaaactatcgcaaggacaaaaaaaccaaaccccacatgttctcactcataggtgggaattgaacagtgagaacacttggacacgggaatgggaacatcacacaccggggcctgttgtggagtgaggggaggggggagggatagcattaggagatacacctaatgtaaatgacgagttaatgggtgcagcacaccaacatggcacatgtacgcatatgtaacaaacctgcatgttgtgcacatgtaccctagaacttaaagtataataaaaatatatatatatataaaaataaaaaaataccttctaaataactcttggaggaaaagagatacaaacaaattacaggatttttgaagaataattacagataacaaaaatactacatgttaaaaatccatggaataatgttaaaaacaagtgtttaacaaatgaaataatgaaatcaatacaaatgaaataatgaaaataaataaattcccaactcaaaaacctagaaaaaagagaaagtaaacaacaacaaaaaaacacaagaaactactaaagataaaagtggaaattaataaagtagagaacagaaaaatagtggatcaaattaatcaaaatcttggttctttgtgggggaaaaaaacaccattaattaatataataatcaaaacagtggagtaaaaacatgcacaaaatgagaaatgacaagggagaaatactgttaatacagagaaaatctcaaaaaatactgtgagactacagtagattcctgtgcaaataaatttgaaaacctagaggaaatggataatttcttaggcacgtacagtttaataaaattgagccaatttgagatggaaagcttaagcagaccagtttccatagaagaaaagagaaagttatgaaggaactacttcgtacaaaaacaccaggcccagatagattggcaggaaacttctgtcaaacctttagagatcaggtagatagtcctaatgctacataaattgttttagagcataaataataaaggaaaacttccaagttctttgaatgaagcaagtataacattgaattaaacaaatataacattgatttttttatgctatctttatcaggtataaccttaaacctcataaagatagcatagaaaaaagaggatatagactaatgtaacttacgaatattgatataaaagtcttaaatattaggggacagattgcaacaccacatttaaaaaaagtacaccatgatcaagtgggatttaatagcaggaatacaaggttggttcagtatttgaaagtatattactataaagattatacgattatcttcatggatcagagaaagcctttgacaaaattcaacactcattcctaataaaagcttgagaaaaatcagaatgggtggctgtttcctttacatcataaaatgtatatatctaaattctagagtcagcatcttagtgggaaaccatagagacatttcctctaaggccgggaacaaagcaatgatgcctactgtctccattactatataatgttctgattggctagcctatgcatttaacctagagaaaacaatcacaggcataataatggaaaaataaaggctgagtgcagtggctcacacccataatcccaacgctttgggaggccaaggtgggcagatcacttgaggtcaggagttcgaaaccagcctggccaacatggtgaaaccccttctctactaaaaatataaaaattagctgggcgtggtggtgtgtgcctgtaatcccagctactcgggaggctgaggcagaagaatcacttgaacctgggaggtggaggttgcagtgagcccagattgcaccattgcacttcaacctgggtaaacaaagtgagattccatctaaaaaaaaaaaaaagaaaatataaaacgtctctctttgtagatggcatgatagtatacctggaaaaccctggagaatctgtgataaaaccatctataaacgaattcatcaaggtagcagaatataaaattaatatgcaaaaatcagtagcattcatacataatagccagttagctcacgcctgtaatcccagcactttgggaggccaaggcaggcggatcacctgaggtgaggagttctaaactagcctggccaacatggtgaaacctcaactctactaaaaatagaaaaattagctgggcgtggtggtgcacgcctgtagtctcagctactcaggaggctgaggcaggagaattgcttgaacccgggaggtggaagttgcagtgagctgagatcacgccactgtactccagcctgggccccatttacaatagcaacagaaaagttaaaacaggaataaacctgagaaatgtccaaaacccatgcgaaaaaaaactatgaaacacttctgaaggacaaagtagaaaactaagaagatatcccctgttcttgattggggagtctcaacatcacgaaaatgtcaattcttccaaagttaatttatcaatttaataccagtaaaaatcccattgagctatatatataagttgactgcaaaattcatatagcaaattgtacacacagggatagttagggaaaagctgaaaagagctctgagagaggattaaccatagcagagactaaacaccacaaaaacttttataaataagagtgcagtactggtacatgagtagataaacagaaacggaataggatacaaagaatagaataggtaatgcataagaatggaaagtctcaaaatagacccaactacaagtaaaatctagtatataataaaattacatcttaaaacactgaaataaagataatctttgacaaatgatattggaacaactggatggacatttggaaaaaatagatgaaattagatgtgtttctcatattcaagagaaagctccaaatgaatcagaaatttaaatgtaaaaaacaaatctaaataaatgttagggctgggcacaggggcttatccctgtaatcccagcactttgggaggctgaggtgggaagatcgcttgagccacgaggttcagattacagtgagctatgattgtgccactgcacttcaacgggtgaaagtgagactctgtctcttaaaaataaataaataaataaataaataaataaataagtatatgttagaagaaaacatggatgaatttctctttaagctcagtgcagtgaaaagctttctaactgtcatacaaagtatagatgcaagaaaagataagtttgtctacatataagttaaaaagtttgtgtggccagaaataccataagcagagtcaaaagacaaatggcaaactgggaaaaaatatttgtaacgtatcacagaaaaaggattaatatccctaattcataaataacttgtgggggggggggggaagataaactgtattttaaaaaggcaaaaaacatgagaataatcactaaaagatatataaaaatggccttaaacataagaaaatatgctcaacttcactcataataagagaaaaataaaataaaagatagtgatccacctgccttggcctcacaaagtgctgggattacaggcaggagccaccatgcctggccccatgtatatttttatgtgtataaacatgcatacatttcctggctctctccaatgaaagaaccatgaagcaaagatgccatagttgctcggtgcggtggctcacgcctgtaatcccaacactttgggaaactgcgtgggtggatcacttgagtccgggagttcaagaccagtttgggcaacgtggtcaaatcctgtctctataaaaaaataaataaataaattttaaaaagatgccttagtaacaacaaacacacccatcacctagatctttgctgtttcataaccattcctcactcaagggaaccagggctcttcagagaaacggataagtttatgcgtgggcaggatggatacaagatgaacctggaacatcttgctataccagaaagtaaagaagtgctcaaaaaagacagtgggggcgtgtcacaaagacagaagagccagcttgaagggtttccctttggccaaatctgggactatttgagcatcaaaataagttcaataatgaaccattgaaaaatacagagatttataagtccatactcataattaataaataaattactttgggagttcgaggacggaggatcacttgagtccaggagtttgagaccagcttggacaacatagtgagaacccacctctacaaaaaaataatttaaaaaattagcatggcatatcagcacacgcttgtattcctagctaactggagggttgctgaggcaggagaattgcttgagcccaggagtttcaagttatagtgagctatgactgtgccactgcagtccagccagggtgacaaagaagactctgtctctaaggtaagtaaagtaagtaaatgaatacatgggtagaaaggagttctcttgcttacagtgcaggagttggaaaatcattcctttgcaattgtaatggtaaagattgaaccagacaagaaataccaatggatgttaaatccagggggactttaaaaacattgatacgatacaattaatgaagctaagaaccttattccaactctccccagtaattatttcactaatgttctctttatgttccaggatcccactcagcatcctacattgctcttagttgtcatttccccctgatttcctacactctgcaatagttctcagtctttccttatctctgttgatcatgatagccctgaggagtattgattagttgttttgctgaatgtgtctcatttagggcctgtttggtggtgtctcatgattggaccaatgtcttgtatccctggcataaggaccacagaaatggtaccatgccctttttagtgtatcaaatcactgagctcttgatgtcagtgttattcctggtgatactgactttgataacctggtaacagtggtttctgctgggcttttccattttacaggaagaaaattagatgaggagcaagatatttgcatgatcttaaagtgtctccctataaattgcttactggtggcaaagggacagggtgggggaagtaattataaagtgggatcagaatatcaccaatgagggacagatggacatcatgtgcttcctgatgtgatactccgagaatgacatgatatcacctgtgttcttgtgagaccgcataaactcaatctagccacaaggaaacatcagacaacacaaaatgaggaatgttctattttttaaaaactaaaatttatttggattatgctgttaacttggtagttacagtctgccaattaattttaaagccttctgaggtaacagggatacttaaatcttacttgctctatttctgagttttaaaatgtagtaaaaagcataactgaacatggtcaaaagaaagactgaagatcacataagtggaaggaggaagaaggggagtagaggacagagtcaatagaagaaaattaacattcgttgagtacttgtcgtgtgttaggctctgtgcaaattcttctcccctttatctcagtcctttgaggtggggaaatggacacacataacagattaagttgcctgaggttttatagctagtaaatggcatagctaggatttacatccagggcttctgattctggatccagctttttttccctcttcctatgccacactgctttctgttgaaactgaactatttcaaaaagagtcaacagcttctcagccttggcagtgctcacgttttggctcggataaatctttgttgtggtgggctgtccagtgcattgcagaatgtttgatagcatctcttacctctacccactagattccaacagcatccttccagttgtgacaaccagaaatgtttctagacattgtctagtgtcccctgggggacaaaaatcactggttgagaactgctgctctaagggttatgtcaaggaccaagtactctgttggaaggtataggcaagagtagtcagatacttctttattatatatttaatagagagatggactccagctagaaacaccagcctcatgtacttgtggaagagagagtttattgttttattagtcttggcttctgtgacacctctctctcgagattatcctccaatgttattgacttcactttctccattgtctttgctggcagctgcttctctttttaatgactgactcttggtgtttctcttctttatattctttcctggatggtctcatctgtttccattgatgctccacttggcatatttcattgtcatctatttggcacttccacttggatatctcagagtagtggttctgagcctcacagcagacccgaatcataaactgtgggtagatcctggaaatttagtaagctctcagggtgatttagatgcttccttaatcccaaattttcagcacgtaaacagatggtgccactatccaccagctagctgcttaagccagaaatttaggaatcctccttgatttctttcttttttgttgtttttttttgatatggagtctcgctctgtcacccaggctagagtgcaggggcgtgagctcggctcactgcaagctccgcttcccgggttcatgccattctcctgcctcagcctcccaagtagctgggactacaggtgcccgccaccacgcccggctaattttttgtatttttagtagagacggggtttcaccgtgttagccaggatggtcttgatctcctgaccttgtgatctgcccacctcggcctcccaaagtgctgggattacaggcatgagccaccacgcttggccagatttcttttccttcatcaccaccccctacttcccttccaaactaaggaatttctattcttagttctcaaatatttatcttagatctatctacttttcttcatcgcctgtattagtgtgctagggctgctgttacaatgtatcacaaattgggtagcttaaatagcagcaatgtaatgtttcacagttctggagactagaagtgcaagatcaagtgttgtcagggttggttccttttgagggctatgagaatttgttctgtgtctctcacctagcttctggtggtttgttggcaacctttagcattccttggcttgtatcacctgatatctgctttcatcttcacctgacattccccctgtttgtgtttctgtgtccagagttcccctttttataagggcattagtctttggattaggacccatcctaatgacctcaactaatctcacctacaagaagagcccaatttccaaataaggtcacattctgaaatactgggggttagagcttcaacatatgaaatttggggttgtggggaggacacaattcaattcataatgcctctattactttggtctaggccactgtcatctctctcttaaacatggtagcagtctactaacaggtatccccatttcactcttaaacccccataactcattctccacacaaggagcaaggatgatttttgaaaaatctatcatcccatttccttcttttctctttagtaacttccgttgcacttagagaaaagctaaacttcctaccatggcctgtaagattcttcataatctggtcctttcccgtttctcttcaaactcatcttctactactcttttctttattattctccagccatgttgatttttttttttttaagcaaggctttggcctcaaatatgccaagttctttgctgcttcttggacattgcacgtgatcatacttccatctggaatatccttctctaacgcctttgaataattagctccttcttgtccgccaggtctctacttaaatgtcacctacttctgagaagcttccccttactaccctagaggaaatttccttcctttcctcacttattgtctatctcagcctcttatttggttcttttacaatttttttctgccatcctttcccctcctgctctgttatgaactctgagtcaaattactatgtctgttttgttcatctttataacatgcctaaggaaaataacatgctcaaaaagtatttgttggatgaatgtatgttcccaacttagtgctaagttataaacataaatgtttatagaatgagtaagaatagattttagtcttgacaatccaggatcatattaagatataccctcctctgtctaaaaattatggtgtttgtaatacttggcgtctctgaatgatctgaacgtgacagaagagtactttttcatattgagtgtttaggtcattggggtaaaagactgttgccagagacttgtacctttttctttctttgcagttgactaatctccttcagaatcaagcagtgaaaggaaaagttgctggagcactcctgagagccatcttcaaaggtaataataattaatgtcacttctgtctgtctcctgcattcattggtagatttgtttagttttcgtacttttcttacggtttgaagccccactggaacattttccatgttttgaggattctacagaatcaactacagcagcagtttcctgtctagtggacttaagtaattttactgaagggagtttgaagtggctacctgagattgcgttgctgatttgggggcctataattacagaatgtgcttttcgtaaaatctgctttggtttacttgtgcttttaagattgtggagaagagaacagcaatgtttaatacataatccatgcttagcaaggggcaagtaacctctggggtttaatgaaatggggtatcttaaggtgccttatatagagattcttcatgcccgctgagacgtatttgttttcttgtcttgaacaagggctagtttaaattgttgcagattgtgatttatagtggttttataaattctggtaggataaaattttacaaggcaaaaattaaaagtgtctttggactcttaattaggtatgttaacttggtttatttttcttcccccaagtaaattagatctctgctgcaagggtacaaaaacacatcttcctattcatgaaagaactttcaagattggttgagtcaacctgtatggaaacttgctaaatattttatagaaatatcagagaaaaggaaataattaaagatcaatagcaactgcctacgtacactactactaaatggaagagcaattctatggcttttagtatattcagagttgtgtatccattaccacaattgattttaaaacaatttccttacccctgaaagaaggtttgcatctcttagatgtcacctctccaaacccctagtccattccagtcctaagaaaccacgaatctactttttgtctctacagatttgtctattctggacatttcatttagtggaatcattctatatatggtcctttgtgactgacttctttcgtttataatgttacaaaggttcctctatgttgtaatatgtatcagtactttatttttactgctgaataatattccattatgtggatatacaacatttttccattcatgagttgatgaagacttaagttgtatctattttctggccattataatactactatgaacatttgtgtataaatttttgtgcggacatgttttcctttctcttggatatatatctaggagtggaattgccggatcatgtggaaactcttatgtttaactgagaaaccgccaaactgttttccaatgtggctggattaggatgccaattttttcacatcctcatcaacacttgttattatctttttttttcagttttgatttattttcatcactttttctacatgatccagatattttaaaatgcaaagaaaattaactttaatgatatgttccaggatcggcactaaaaaaaaattttcagactgcaaatgaattatacaaatgaaaatatcaaatggagatccccttatccaaatgaaagcactcaacttattaaaagttcacaagtatttgtatagagcacattaaaaaagtcagcttgctaaatgttttgattttaaagaacgattgcagaagtctgaagaaaatagattagttattaaatttgggttactggacttctcaaaagctgtaagacctattagaaggttacttcatcctgtaattattaaaataataggtagatgaagaaaagatgacattttagtccctttattttggctaaattaagcactttttcaaagcccttaaccattgctgttctaagcaccgtagtaatcagtcgtttgataattctgtttttttgtatttaactacaaacctgttcgtttttcctatttacctgtcaatgttgtaagacttgtttctgaaccccctgtttaaaacaataaggttccccctgctctgaggaagctggaacacttaggagacgtaagatatacacttgttgtatccagttggtggaatcgggggatttgcagaaagaaatagcgtctgagatcataggattactgatgctggaggtaagatggcaaacaaaaacttttatttgggggtaggtttttgagggtttgtaatttgttgagggaaggaaaacttaagtgcccaacctagcatagtccttatttatgagtaagacctgttgttaaaaaacaaagaagcaggccgggcatggtgactcacacctgtaatcccagcactttgggaggctgaggtgaggatcgcttgagctcaggagtttgagaccaccctctgcaacatggtgaaaccccatctctaccaaaaatacaaaagaaaaaaaattagccgggctcgtggcgcatgtcagtggtcacagctacttgggaggctgaggcaggaagatcgcctgagccagggaggcggaggttgcagtgagccgagattgcaccgctgcagtccagcctgggcagcagagtgagaccccgtctcaaaaaaaaagcagatgaatgggttataatccacttaggtgtatatattacatttctggtaccatggacatatatctctttgaagagctggcatatctgaaaacatcagggaaccgatacaggattctaacttttgaagcccttcacaattataactacgtaccagacagagcagaatgattccataaatcccttatgggaccagttctggatctcggtcaattcatttatttcagcaaaagactttatttcttagaaagatttatcaaacattggatttctgcttgagatttcctttatcctgtgaacttttaggctcaccattttccaggaccattattggttgaattagccaatgagtttattagtgctgtcagagaaggcagcctagtgaatggaaaatctttggagttactacctatcattctcactgccctggctacgaaaaaggaaaatctggcttatggaaaaggtaattttcttccgactttagtggctttttctctatgcacataatcaaattcattgctcagtatattttgcatttctaggtgtactgagtggggaagaatgtaagaaacagttgattaacaccctgtgttctggcaggtgagtcttgttaatatgtataactttcttaggaatacaagtggcggaaaaaaaaccactttatttcaggaatttatgtctggaggttttaagtccttcttttttgttgtttttaatataacactataaaactatttagtctgcaatgaattagtgagaaagaaatgatttactatattctgtcctctaagactgttcatatagttttatttgcttgactgtatcttcttacagcaatttagtgtgttaagatacacataattaaatgttaatttagtgtgtttaatgctccaatctaagcattattggagtctcaaggtcgtgaaggctgggaaagtcaccctgctgctgcatcttttctttttttcttttttcttttttttttgagggagtagaatatacaagtgatgtatcctttaaccagtaattgtatttctgggaatctacattaaagaatgactgcaacatacaagaaaatcctcacatatgaacatgttcaacacagaaatttgtgaccagtataagcatacagtaatagagacatgtaaactatgtaagttaaggtagagccactccatgacatttatacctattaaaagtgaaatgtatacatcaaagatgaaaaattctaaccatataattaacaaagagattactatgttatataatactgtgattgcgtgtaggtttgttaaaaagaacaagaagggaatacccaagattatctaaaccagagataattgcttttatggttccttacataagatcccttacataaatcattttaagcatgtatttgtcaattaatttgtttttaattacacaagagtttattcaatacatactgtaatataccttgcattttttatttaatacaactgtccatgtcagcatatacaactctacatcattctttttaatggtttgcagtaatctattatttggctaatctacaattgtcagattatttggttatttccagtttttgtgctattacaaagagtgttgcaatgaatgtcttttttaattttaaatagagatgggaatcttgctttattggccaggctggtctcttgaactcctggcctcaagggatcctcctcctttggcctcccaaagtgttgggataataagcatgagccactgcacctggcctgaacatctttatatatctagatgaccttttataagcatgtacatggcatatatttcaaatagtaaattgggtagatctgtgattatgtgcatttttaaagttgataactactgccagcttgtcatacattccctaaaacggtatgtgaatagagtttgttttccacaatctcaccaacattgggtatcatcagaattttgattttgcgagtcgggtaggttaacaactgctatttcattgttttaaatggtatttatttgatcttgtttctcggtattgcaaaatcaaacttgaattggccctgtttttttgtcctcattaattttacaaagttatatctaaataagttgtaaagaaataaactttgtcattttcttctaccaggtgggatcagcaatatgtaatccaactcacctccatgttcaagtaagcatcatcttttcccttttctttgtgtatcctgctttgtgaacttacttgctagaaattaaactatagcaaacgtaaacatcactctctcctgattgtaagaatattagtagttatgttttctgttacagattcacagattccctcctcactcctgcctcctttttggctttacttacttatttaaaacataactttattttttttataagaatgactttgcttaggtaaggttattggttcccttaaaggttcttcattagagaaaaatcaaaagggacagttataataatctattatctctttaattctctgctcccaagtttcatttcttaaaatatgtttaatggaattttaaccactgtaaagccctgaattgaatttctgaaaacaaggcagttagacactgtctatagcctttagaatctttgatccacagggatgtccctctgactgcagaagaggtggaatttgtggtggaaaaagcattgagcatgttctccaagatgaatcttcaagaaataccacctttggtctatcagcttctggttctctcctccaaggtacaaatggaaaattgtttctccttagttctggtggtatgaccagttatgaccattcaacttattcatacccttggtttatatagcagagcaaacatagccgaacatagatgctttcatttcacgtgagcaaacatagccgaacatagatgctttcatttcacatatagtggtttggtctggtaaaaggatcatacttctcatccaaggaaaacatgcattatctcttgtattgccacattttctttgcggaggtaaaagggataaagatctcagaaagggtagactataggccccataaattcttacagtaagaggtatttcaaatcttgtttcaacatgaaagtgttctatacattcttagtttgagtctaagtcatagattatttatttaaatttgtactggagaattctttaagctgaaaactactttgaattcaaattggttattttgctgttaattgggagaccttaccaattttgtattgttttcagggaagcagaaagagtgttttggaaggaatcatagccttcttcagtgcactagataagcagcacaatgaggaacagagtggtgacgagtgagtaatatagtgtagaaataaagatcatttttacaaattcatcttctcattgtgtattttagctatttcattttcttctctctcaccgcctaccttcacctcagcacaaaacttttctaatcttctcttagctactcagtaataaagagaataacatgatctcttcagctctttcattttcacctttccaggaaaataattgtcctataagctgcaagtttaaaacctatttattaggtgtcagctctctgccaggaactgtttagccttggggctaccgtgctgaaccagtcagacaatgtccctgctcttgtagaacttcaattttagtgagaagaggaaagaaaataaataacaagaaaaatgttatagtaaaagtgctatgcaggtaattcaaatggatgatctaccactgacagtatagctactttagattgggtcagggaaaacctctctcagatgtgctattttaactgaagcctgaatgataagatccataatatatagatcagagaacattctcaggtagggaaataatacaaaggcagaagaacagtgtgacatgtctgagaaagaggattttgggttttttttgtttcattttgttttgtttttgagacagagtgtagctctgtggcccaggctggagtacattggcatgatctcagctcactgcatcttccacctcccaggttcaagtgattctcctgcctcagcctcctgagtatctggtactacaggtgcgcaccactacgcccagctaatttttgtatttttagcagagacagggtttgccatgttggccaggctggtctcaaactcctggcctgaagtgattcaccctcctcggtctctcaaagtgctgggattacagacatgagccactgtgcctggccaaggatttttgttttttctttctttctttttttttgagatggggtctcactctgttgcccagactggagtgcagtggtacgatctcggctcagtgcaacctccacctcctgggttcaagagattctcctccctcagcctcctgagtagctgagattgcaggcatgcgccaccacgcccagctaactttttgtatttttagtagcgatggggtttcaccatgttggccaggctggtcttgaactgacctcaggtgatccacctgcctcggcctcccaaagtgctgggatcacaggcgtgagccaccgtgcctggccggattttttgttttttaagcaaacatttgtaggatgttcattctgtgccaggggctattctaagcactttaaacctcacaaccctattttacctctactttatggatatggaaatcgagagacaaagaatttagttagtttggcttgagcaatttattagaggtggtttcttatttcttttttttttttttttttaagagtgtcttgccctgttgtccaggttggagtacagtggcaccatcatagctcactacagcctccaattcctgggctcaagtgaccctccagcctctgcttcccaagtagctgggactataggcacgtgacaccaagcctggctactgttttttttttttttttttgagatggagtctctgtcacccaggctggagtacagtggtgtgatctcggctcactgcaacctctgcttcccaagttcaagtgattctcttgcctcagcctcccaagtggctggcattacaggcacccaccactatgcctggctaattttttttttttttttttgagaggaagtctcactgtgttgcccaggctggagtacattggcatgatgtcaggtcactgcaaactctgcctcctgggttcaagcgatcctcctgcctcagcctccctagtagctggggttacaggtgcgtgccaccacgcccggctactttttgtatttttagtagagacgggctttcaccatattggccaggctggtctcgaactcctgacctcaagtgatccgcctaccttggcctcccaaagtgctgggattacaggcgtgagccactgcacctggcccaagcctggctaattttaaaaattttttctagagatggtctcactgtgttgcccaggctggtcttgaactcctagcttcaggcgatctcctgcctcagcctcccaaagtgctggaattacaggagcaagctgccacacccagcagagaaggtggtcttagatactaaattagaataagctgacagagaatcagattttggagaaaataattagctcacttttttttttttaattagctcacttttgaccacactaggtttgagatatatattagggtcccataaggagatattaagcaggtactctggagtagtagggagagggctgaactggggataagactggaagggactaaagccaagagactggatgggattatcaagggaaagcatgaagaaaaacctaagactgagttcagaggcattccaccatttcaaggtcaagcactttgggaggccgaggcaggcagattgcttgagctcaggagttcaagaccagcctggatgacatggtaaaaacctatctctacaaaaagtacaaaaatagccaggcgcagtggctcatgcctgtagtcccaactacttgggaggctgaggcaggagaatcacttgagctcaggaggcggaggttgcagtgagctgagattgcacctttgcattccatcctgggcaatgggagtgaatccttgtctcaaaaaaaaaaaatttttttttttttttttgagaagaggccagtgatgatgccctggaagctaagagaagaaaatttttcaagaaagaagtagttaattgtgtcagatctgagatgttaattaagatgggactttattgtttttgacaacttggaggtcatttgtgacccttgaaaaaataatctaatgttattgtgggggtgagggtagaaagaggatagaagcctgattgaattggattgtactgggaagagattgtgagataaaaaaggagaaattatgactatacacatttattttacgaaatcttgtaaaaagaagcagagtctgggcacagtgaatcgtgcctgtgatcccaacgttttgggaggctgaggcatgagaatcacttgagcccaggagttcaaaaccagctgggcaatatagtgaaactccatctctaccaaaaaatagaaaaattagccgggcatagtggcacatgcctgtagtcccagctactcaggaggctgaggtgggaggatcgtttgagcctgggaggttgaggccacagtgagctatgatcatgccattgcacaccagcctgagtgacagagcgagaccctgtctcagataaatagatggatagatagatagacagacagacaggagcagaaaattgggcagtagaatttctagtaaacacctgccttcagtgattgtatgagtttagcttgagttggtctacttgctcatcgtagcacctgtccttgtctctcactcaaaaaccatagctcataccttttttttgttgttgttgagacagggtctctctgttgcctaggctgaagtgcaatggcacaatcttggctcacggcaacgtccaccttccgggctgaagcaatcctcccacctcagcctcccaagtagctgggactataggaatgccaccacatcgggctgatttttttgtatttttagtagaggctggtcttgaactcctgggatcaagtgatgcgcccgccttggcctcccaaagtgctggcattacaggcatgagccactgcaccttatagctcataactttctgttgaatcttttaggctattggatgttgtcactgtgccatcaggtgaacttcgtcatgtggaaggcaccattattctacacattgtgtttgccatcaaattggactatgaactaggcagagaactcgtgaaacacttaaaggtagcatcaaacttgtaaggtgatctgggtctcttttgaatgaaagtgtttgaacttaagccactgttatgccagttaatgacaggaaataaatactgtaaaatgaccctgggtgtggaggatctctttttttttttttactttaaaagtggaaaatacatgatgttaccacactcccttttttttaatgtcctcactttagcagtataccacatccttaagcaagccagaaagttctatttaaaaaaaccctcaaaagttctaacgcaaaaaagtgggaaaaaaggtgagaactattcagcaggaaactcaaaatctaattctaagtagattatgtgtcactgtcttatgtgaccttcagctatggcctctgctttctcatttatgaactaggatgttgcatctagtagtatatcgtggagttgtgtgatgctaagtcattcatcatgaagtatttgtaaagcagtaaaataaaactcagaagtgttttaaactatattaaaagtagtgtacagatatatttgttcctccaactttttagtttgaaaattctaactcagaaaagttaaaacactacatagcgtgaagaacacctatgttcccttcacctagattgaccaattattagacactttgccacatttacctcactttttctctcatacatattctttttctgaacatttaaaagtaagatgcagaaacccaaaccctaacacttcaatgcctgaatatttcagcatgctaagaataaggacacattatcacaataccatcatcacatctaagaaaattaacaataattccataatattatttaatttatattccctattcacattttcacagttgtctctaaaatgtcttttgcagctgtgttttttttttcctctgctccaggctctcatcaggcttcatgcattgcatttggttgttctttctttctagttttagactgatttttttgaagcatcagcccacttgtcttgtgtaatgtcccacatttttggatttatctgattgtttcctcacgattgggttcaagttaaacatttttggcaagaatacttcgtaagtgatgtgtacattttcttgcaagggccagatactaatattttacactttgcaggccatgcaggttctgtcacaactactcagctttacggttccagcaagaaggcagccatagacaaaatgtactaacgagtgtggctgttttcccatttatggacactgaaatctgaattttattccgtttttatattgtgggatattattcttcctttgatttgttttttttttttggacagagtctcactgtgtcacccaagctagagtgccgtggcccaatcttggctcactgcaacctccacctcccaggttcaagtgattctcatgcctcagcctcccaagtagctgggactacaagtgcgtgccaccacgcctggctaattttcgtatttttaatagaggtggggtttcgccatattggccaggctggtcttcaactcctggcctcaagtgatctgcctgccttggcctcccaaagtgctgagattacaggcgtgagccactgcactggccttcctttgattttttttttcccccaaccatttaaaaccataaaaaccagtgttagctcatgggttgcacaaaaacaggtagtgggttggatttggccaacaggctgtatgtagtttgccaaccactgttctgtgcattacatcaggaggaacatagtattagctaccttactatttgtgaggctgaatcatttgcttttaagaaaatgaccattgattttcttcatttataggtacatatgtatccctttgtattagaaagaaatctataggatcatagttcgagatagtattcaaaatccttttcccaacaacatttcacagaaggttttcgttttcccatctattgatgattcttggcctaaatcagtaattataccaggaattcaaattttatatcttattttttttttcttttttttgtcctcacaatctgttcccaaggaattctaattttaattagaaaattttaattgcatctttctttcggcattattagctggcattcttctgtaaaaagagcctctcctttccctattgttttgaatatcattatgcactcatgaacctttttaaattcaatgtacttattattcattactgtcattatttgttttgagcacaaaattacccaaatttagccagttggatccttcaagtcagcttatgtgttcttttgatgtgaccccatttagtctttgagcttgtggcatgatatgcccaaggctcaccatagtactttctttgccccatcctgatgctagccatgtctctaaaaagccctgggtcccttctgtaggaaaggatatttaaagaccataatctgagtaggctttaaaacttctttatcttctctgtatctgttcactctttttttaaatttaggttcgtagtaactatattgctggcctttttaccagctttatgtattttgatccagtctgttgttttctttttgttttccatttgattgctgttttattttacattttttttgttttactagtatcttttctaggccttgaaaatgtattctttaaactttttgaggcacaatttacatagcacaaaattattttattctaagcatgcaatccagtgattttttttcataaatttacctagttttgtaactgtcactataatccaattttagaacattttttatcaccctgtaagatcttttatgcccatttaatctgcattagcactcccagtcccaggtaaccactaatctactttctgtctctatagatttacctttcctagatattttgtataaatggaattatatgatatgtggtcttttgtgtatgtcttctttcattaagtgtaatgttttcaggattcacctgtgttgtagcgtatgtcagtatttcatttctttttattgttttgtttgttttaggagacatggtctcactctgtcacctagggtggagtgcaatatcatgatcatggctcactgcaccctcaaactcctggcctcaagtgatcctcccactgtagagttctgactagctaggaccgcaggcgcacaccaccatgcctggctaatttgtaaacaatttttttaagagatggaggtcttgctgtgaactcctgacctcaagtgatcctcctgcctcagcctcctgagtagctgggattacaggtgtgagctaccatatcaggctcatttctttttattgttgaatagtattccattgtgtggatatatatgagttttgtttagcagtctcccagctggtggacatttgaattgtttctactgtttggctattacaaataatgctgccactaacattcaaatgtaagtctttgtgtggacatacattttatttcttttgtgcatatatccaggagtagaactgctggcttatatgagaaatttatgtttatatttttaagaaactgcctgttttccaaaacggtatcattttacattcccactatcactatgtgagggttcctatttctctgtgtcttggccaacatttgttattgtctgtcttttttattatatccattctaatgggtatgaaacagtacctcattgaggtttaactttgcattttcttaatgactgatgataattgagcatcttttcatgtgctcattaactgttctaataccttctttggtgaaatgtctattcaaatcttttgcccgttttttgagtgtgttgtttgtcttcttaattaaaattctttgtatattctactgacaagctcttttttattttttcaataactttgttatgaatggtgacaagttctttatcaggtatataattagcaaatattttttctcagtctgtgacttgtctttttattttcttaatggtatcttttgaagtacaaaagttttaaattttggtgaggtccagtttatcaattttttcttgtagaaattatgcttttggtattgtatgtaagcaatctttacttaatccaaggtcttgaaatttttctatatgttttcctctaaaaatattacaatttttgctcttacatttggatttctgatccattcaaggacctatttttattttttattactattaaaaaatgttttttatgtctctcgagtcataaggacttttttgggggatgcagtggcgcaatctgagctcactgcaaccttcgcctcccagattcaagtgattctcctgcctcaacctcccgagtagctgggattacaggtgtgtgccaccactcccagctaatttttgtactttacaagacagggtttcaccatgttggccagactgatcttgaactcctgacctcaagtgacccacctgcctcagtctcccaaagtgctggcattacaggcataagccaccacacccggccaagggacttactgttaaataggctgttatacttttaagatgtatgtaatgggaccaggtgtggtggttcacacctgtaatcccagcactttgagagaccaaggtgggaggatcacttgaggccaggagtttgagactctcctgggcaacatagtgagacttcatctctccaaaaaaattaaaaattaaaaattaaaaaattagccaggcatggtatagtcccagctacttgggaggctaagccaggaggatccgttgagcctgggaaatcaaggctgcagtgagctatgattgcatcactgcactctagcctgggcaacagagagacccaatctttttttttttaaaaaaaaaaaaaaaagaaaaaagaaaatgtaagtaaatgacttccttttggttgctctcttctaggtaggacagcaaggagattccaataataacttaagtcccttcagcattgctcttcttctgtctgtaacaagaatacaaagatttcaggaccaggtatttttttaaaatgccattttgtttctttctgtagttggtaaaaaaaaaaaaaaaaaaaaaaaatcacagtaatctgtttttgttgtatccgttcctaaacaattttatccccttcctgccagcagcaaagctgcaataagacatgtatgtcccctctgttctctggggattgatggaaaacttttacaggtttttggtttattcctccgtttcctgttgtgtggtaagctaggtagtgaggtgggaataagagtggaaggataccacacagccccagttggaggaagggacaatttagctggatattcaccagcagttttactatgttgtagctttccaagagtaggttagttgcaaggatgaaatttacaatttttttcttatatgtgttccaggttgtgggtaatatttatattgacttttagccttttttcccccttttttcttaaggaaggcttgtcttcagctccttaaagttcccactgaatgtcataatttttgtaacatcttcatctagttaaaatagttgtcatagggatatatgtgaatggcagctcataggaacagttataaggttaagatttatagcatgagctatataatatttgctttattttcttatttctttcattctgttaggtgcttgatcttttatttatttattttttcatttatttttattaactatactcaaggtgcttgatcttttaaagacttcggttgtaaagagctttaaggatcttcaactcctccaaggctcaaaatttcttcagaatctagttcctcatagatcttatgtttcaaccatgatcttggaagtagtgaagaataggtaagttggtgaaccatatctcaaaaggtttataaggtgtttaatgttagaaaatgcaatgtgatatcatacttgcagcctgtgaggggaaactgatgacttaacagctgttgacgtcacacatcgaggttcattttcttaaaactggtagaggatactttttccctatggaaatatccttgaatctcaggccctggtttcttggccaccttgacagcaagcatacaaaactgaattagttgcttttgtttattccatgatattacaattctctattttccttttctttctttcctttttttttttttttttttttttgagacagagtctcactctgtcaccgaggctggagtgtagtgccacaatcttggctcactgcacccttgacctcctgggctcaagcaatcctcccacctgaacctctcgagtacctggtattacaggcatgctccaccatgcccaagtaatttttgcgttttttgtagagacagagtttcgccatattgcccaggctggtcttgaacttctgagctcaagcaatccacctgccttggcctcccaaagtgctgggattacaggcttgagccaccggtcctggccgtttcttttcctttttaaaggaaacagtctcactatgttgcccaggctggagtgcaatggctattcacaggctctattatagcacggtaaagcctcaaactcctggcctcaagtgatgctcccacctcagtagctgggactataggcatgtagccctgtgcctggcttggcctttcttcttttttttttttttttttttctgaagacgtaggaacttttcactatgttgcccaggctagacttgatcttctgggctcaactgatcctcctgcctcagcctctcaagtagctgggacaataataggtgcatgccactgcatctgactcatggcctctttttaaagtgagtaaaaaacattaagagttttatttactttgttgaaatttggagcgtacagttggaattcaattattgattagccagtttagagaaattcatttaaaaccacatggaaaacatcagtaactgtcctggtttttattttaatttcaggatatacattagctgttgtaacagtctttactatgtcatgctttcactgtgtattaaatatattttaaagtttcataatttaagcataatttatggtaggcctcttctaggcctggaattcttgtttattaatagattgaatttacatgagctttgcagtagggcaaatttgaaattagagtttattgtttgagtgttttacccattgttaggccttaaagctttttaatctttgtatctcattattctttttcctgaggtttatacttgtgtctccagtattttcccaacccaatctcttaaagttgggctaaagaaggaggtactcactaaccaggaaattcctggaaagcttcccatcttctggaaatctcaactgtcataggacttgaaagcatctccatgtataattagcctggagtgggtacttgccactgggtgggaccaaacctcagctgggagagatttggatagccttattagatcctctaaaataactggctggttagttacacatgcttgccccagtcagttaatgaacctttaaataatgcattctccattttatgtaattgaatttttggctcttcagagtatgaatattgttaactctgttaaagtcttataatttatccataactgtctacttcattctgtagtgctgcattataatttgttgcaatttaacaggtagatataatggataaaggttatattcacattatttccactgtggggtataacattaagtggtataaaaccaccaatgattctactcttttacaaaagattatttgtagttttagcttatgctgttgataccagatcactcatccatttatagtataaatatctactgagtgtcttttatatgccacccttgtgctaagcaatgtgggtaaaaatatgactatactatgacctctctcctagagaatctctgtctttggaggggagctaatttgtaagcctctacataagcgttgtcagtgctgtagggtaatagaagaggcagcaatgaacttctcatcatgaaatcttgaataggaatctttaatttttttaatactctctagcttctggattttcccagtattctgtgtgtcattggagaccacttgcctgctgttcccattatggtacatttaggaattcagaattctgtcagacgatgtgtgtaaagaaaaggtttatatgcagagtacgttgattatctaggtcaagtttgggaaatgtataacagggcaatgagtataaaggtaagaatatctcactaagtttttcttttttaactaagctttgtgttcttgtagcgttcatagctgggaccatgttactcagggcctcgtagaacttggtttcattttgatggattcatatgggccaaagaaggttcttgatggaaaaactattgaaaccagcccaagtctttctagaatgccaaaccagcatgcatgtaagctcggagctaatatcctgttggaaacttttaaggtgagacactattttggcaaccactccctaattttgtttaaataatccaagtagggcttggcatttgcctgggagtttggtggacaaggaaatttgagtatgtattagtttgacagaggatatatgacagagattaggataatattgaaacattatagatccagtttgatggaatacttacttacgtattcttctatgtaagtttttcatttattccacttaatccaattgtttctgacctagaagtttgaatataagacagctttttcatgatttttccttcttcttccagaagtaaaccatttctagtttttgttttgttttgttttaatgctgttcctttacacagaagaaatttttttaggtcactgtagagcatcaagcttaaagaatcatgcttaagaatttttactgaaaataaaacaaaaaaagaatcatgcttggtcgggcatggtggctcaagcctataatcccaacactttgggaggctgaggtgggcagatcacttgagctcaggagtttgagaccagcctgggcaacgtggcgaaacctcatctctacaaaaaacacaaaaattagccaggtgtggtggcacgcacctgcagtcccagctacttaggtgactgaggtggatcacttgagcccaggaagtcaaggctacagtgagctgtgtttgcaccactgcactccagcctgggtaacaaagtgagatcctatctcaaaaaaaaaaaaaaaaaaaaagaatcatacttattggttcattgtttctgaagaaaccaaaatgggaaatgtacatttttttgacattattaccaaattatcactgacatctcaatcttaattactgaaacagttttcaaaaatttattttctcttgaataaaaaaatgctagatcatatctgaggttaaacaacttttctagtaattcctctaagtcttcttgatgttcaattgtttaatgtagctacacaccaagagtgtctgctgaaaatgtttatttgggaggctgatctaaatgtaaatctagtgttctaatccagaactatgaagtaaatgtcagaatagttcttgagagttatcagtgtatttgatgatataaattaccctgcttaacagtgatattgttaaagacattatcttagagtatgtttttatatttaaattattatttttcaaaactaaagaggctccatttgatttcacatggatgtcggctttatcaaggcatctttataaattgctactaagtcactaacagtctgaggtctgaacgaattagtctgtaccataaagtaatcaagttgaagtaagaattttaactacaattcaagtgaaaattcagaatgggtctttttaacagcaactgctgtgcttctagaaactgagaaaggggttagggaagatcttttaagtttctagaaatcttcatgggcttttacattttaatttttagaataaaagttatgtatactgtcaggaatatggatattgtcaggtaatggatacctaagtagaattgatcctgtttgatgctgaaccttatatgtagcaatagtttaatgtgatctgtacttttaggctaataaacatggtatttatcctactaatgaatcatctaagcacagaacaaggggaaagttgagtgattctgtctttccagatgattcacattatattctgattttttgagttttactcatatccaaacggttcttcatgctgcctgacatgcattgatatacttaaaagctgaagggtcacccaggaatattttatttattctgttctttttagatccatgagatgatcagacaagaaattttggagcaggtcctcaacagggttgttaccagagcatcttctcccatcagtcatttcttaggtattcaactttgaaagaatgaataaagtttttagaaatattttcatttcaatgtcataatcatttggtcctgggaaaaaaattttaatgagcatttaaatgcagtatctttgataggatgccaataaaggaaatccatttatgttgtctgggattgtcagttgtcaaaaaggctgtagctgttagtaaggaaagcaacaattaaccaataagtaaaacttccattttgctcaacattttctctttttgttaatacctctcaaatgagtgctgtcctgctgctgccactcattgacttcctagtccttttagccttgacatttggactgcacagtgtttctctctggtaacctctgaatttgctgttttgttgttgttgttgttgttgttgttgttgtttcttttttagacacagtttcactctgttgcctggagtgcagtggcgcaatctcagctcactgcaacctctgcctcctgggttcacgcagttctcgtgtctcagcctcctcagtagctgggattacaggcgcacgctaccacacccagttaatttttgtattattagtagagacagggtttcgccatgctggccaggctggtctcgaactcctgacttcaggtgatccacccaccttagcttcccaaagtgctgggattacaggcgtgagccaccatgcttggcctgaatttgctgtttttaatacataactcctaatgtctaaatttactagccttcatcacaaattttaaaaatttctccgtgtcattcatcactgtttataactcccctgaaactttttaggtaagttctctgattactgtaagagtctgcttcttttcctgcctgtgaccagttttccttttacctcaaatataatacagttcccttcaaacaaattttccttttcattgctcctatttccattatttgaagcatggttctccaggtcctggaggctggaattaccttttattttctcaaacacaagttctgtcatttttctccctcatactgtcattgtttctatctttttattccctcctcctcccaacctcacatccagtgtctaattcctattcttactaccttgaatttagactactgccacagctttctaactggtttcctggctttttcttctccctgcagcaatttaacctgcatattaccacacattagtattcctaaaataccaccttatgactacagaatcatcaatatgttctttagtaaattgtcagctctttttgtttgtttgttttttgagatggagtctcactctgtcacccaggctggagggcagtggtgtgatctcagctcactgcaacctccgcctcccgggttcaagcaattctcctgcctcagccttgagagtagctgggactgcaggcacgtgccaccacacccagctaatttttgtatttttagtagggatggtgtttcaccatgttggccaggatggtctcaatctcttgacctcgtgatccacctgcctcaggcttccaaagtgctgggattacaggcgtgagccaccacacctggccaaattgtcagctctttatcctggcactgaaggtgcttgacaagttgatcccaccctacctttccattgttaaagtcagttatttactttcctggattcttcaccccagcatcattgatttccctaccatcttctgaatatgtcttaaacttacctttctcatacctttactcatacttttccctttatatatgtaggcctttctggtgctttgtgcatttaaatgttccccatcttttagaacctagtttaagttccttctcctcattgctttcctaatatataccaactcataatgagctcttcttcctttgaactcctatttaaactctccctttaccatttggtaggcaataaactatgtttggaattaatagatatttgatattgctctgtgatttacctctttaattctttaaaaaaatttttttacttccaactaaattattaaaatttttgaagaaagactatgttttatacttttatgttcctaataggaccatattacgcttgtgcatagtaaaaattcagaaatatttattgatttattttagcttagaagtaagaagatgtgtgctactacttatgtctaggcagtgtaatcggtttcttcctttcttttaggcagtttaatttttatagaaattgaaactatcatagaaaaaagctaaaattatcctggttacattggagaaaaagtatatatagaatcagtagaaatttgtattgcagtatacttgacttatttgagaaaggaaacaaaagacttcacatttctttctccgtatttttcttttatttcagttatctttagttatttgagacaactgattatagattctgtttttcagacctgctttcaaatatcgtcatgtatgcacccttagttcttcaaagttgttcttctaaagtcacagaagcttttgactatttgtcctttctgccccttcagactgtacaaaggctgcttaaggcagtgcaggtaagtcttcagattcccaagtaacttgccaaaactgaggtttaactgtctagtggaagtctgatgcatttttgtataaatatatatgtctaagaaattctattccactttagtctgaaacataaaatttgcattaaaagggcaagagcattgagcaagactgttttccaggtttatttcctatccataacactattctctcaactcattttcaagttaatgaaataattaaaactctcttagaacattattgactacaatagatttacagaggcatttgcaaccagtttcattttagtgtttcagagtatactattgtccttgttaactgtaataaacattaaaacgtatataaaacagaagtaagcttccttatagaagccatatggtaacagtattgggtagaaatgacctaaggctaataagcaaacttgttctgtttttacccactgattctttttcagccccttctcaaagtcagcatgtcaatgagagactgcttgatacttgtccttcggaaagctatgtttgccaagtatgtagcatctttttctatcataggaagacgttgtcttctaatgttggagctaaagttatctctgccatctcctagtaccacctgttcacagtgatcatgagaattcctagccccgcagagcaatttcatcaaataaggcattttgctaagtgctttatgtgcttttttcatttagtcttcagagcaaccctatgaagtaagaattattgcaattcccattttacagataagaaaagttaggcttagagaagatgagtgactttccaaaagtaaaacagtagttggtggtggagcaaggattcaaagtcaggtctaacatcagagcttgtgatgtcaagtactttgctctactacattagaataatcttcagggtaatgttctagtgtcaaatactctgaaacctgagctggcagcagttccaaaggggaaagtaccttagtcaagaagattatacttaagaatctcattttagtgaacatctgaattatgatctagaggctagtagatcaaattaattgttgaggggaatgagttttatttgtagcttagccagtccctcctaacatctcttcctttatttcttagtatataagctagagatgatcttgccatctcctaaaaatataagacagtaatatgtgaaaagcatttggtactttgaggataagatgcccaattaatatcacattggccatattataatatattcatgggtgtccagaggaacaactaagccatatgctattatctttgttctagaattaaaagtttttgttactcctcacccaaaggcatagcgaatagactgagatattacgttgtaacatctttaacatgaattaatcattgcgcctcagtgagaagacaagtgtgacattttctggatggacagtttacatggcatcaaatattacattatcctatgatgaaagagagcatatgaagggaagcactccttcaaacatggcaaaatcagcaatttcttacatttgagtaaccagccaattttacagtctctcagcagtcttcttattcctcacatagacttgagagcaggatagaaggaagtagagtatcatgagttaagtattgaaaaaagtcagttgaatttctgtactataaattgctttgaacagctgataccttattttgagtacataaattcactttgttttgctctacgcttcattgtttatacatatgccttctctgtatgcaactagctggatttttctgacccagaagcatattcctgtgaaatagtactgtttgttaacttctctatttctgagctagccagcttgatgcccgaaaatctgcagttgctgggtttttgctgctcctgaagaactttaaagttttaggcagcctgtcatcctctcagtgcagtcagtctctcagtgtcagtcaggtaaggattatttacgttaacttgcagtgtgtgcgtatcattcatgtgcatcgatgaaatgcacgctgttttcttttattcctgttatggttgtaagaatgatcctagaactaaagagtctgatgatgatgatggtgctgatgatgatgatgatgatgatattggctaacactcattaatggcagatttactgtatgctaaactgtgctatccagtatggtagccactgtcctcagtgtggctattgaatggaacatttgattgaaatgtggctagtccacattgtgttgtgctatacatgcaaaattcataccagattttgaaataaaagaatgtaaaaatctaataatttttaatattgattacatcttcagagagaattttgtatgtgttgggttacagaaaacattaaaatttgactttatctctttctcttttttaatgtggctactagaaaatataaaattacatacatggcttgcatttgtggttcatattatatttctttctttttttttttttgagacggagtcagtctgtcacccaggctggagtgcagtggcgcgatctcggctcactgcaactcactgcaagctctgcctcccgggttcacgccattctcctgcctcagcctcccgagtagctgggactacaggcgcctgctaccgtgcctggctaattttttgtatttttagtagagatggggtttcattgtgttagtcaggaggtctcgatctcctgacctcgtgatccacccgcctcggcctcccaaagtgctgggattacaggcgtgaaccaccacacccggcccatattatatttcttttggatagcacggtgctagatattgtgccaaaatgctttacatttattatctcatttaatcttcacagcagtcctctgaggctagatactattattatcccattttcttacgtcattgtatttactttgcacaggaacatatattacaccttgtaatctgggaaaacaaaactttttataataatctggtaatctaggctttggagcaataaaattgtcttcataatttaaatgatgtactataagatttataaataggagacatttatatataacagtttgactaggaatcctcactttattgctttggtataactacataaagctttgtctataacatatagcatagattaaatattaggaacactagatatcatttgtgtgttattatccccattttaaagacagggaaactgaggctgagccaggttaaataacttgcccaaggttatataaccaagaaagggtggaagaaggatttggcctcaggcagtatgaactacattactgtgatgcctggagtaaggattaggaattcttggtctataattgctgattttattatgtaatttacacaaaggatgtcagttctttgtcatgtccatttctaaacaaaagactgtcttcctctcaacctttctagaatttgtggaatagtgagattcttctagctattgaagaagtcttagaccttttaaataaaattatgtatattgttactactggattctagtggcttgaaataagcagtgtaccttcctaagcaattgatattgtcaaggaaaccttaaggaatatgaacagttaattttgttaaaatgcttaaaaattctcttattccaaaccagaataagagtgacacttactactgcatggtaatgattatactgtgtgtctcacccctggggtttggcatgtggaggaagctaagttttttcgaccaagaacataggctcatttagctccttattggaaacagctttggtaagatagacgtgaattggcctgtcttcctttcaggttcatgtggatgttcacagccattacaattctgtcgccaatgaaactttttgccttgagatcatggatagtttgaggagatgcttaagccagcaagctgatgttcgactcatgctttatgaggtaagtccgtagaatggaaagaatgtagcaaaaccccaactaataatttttattttagtaatttttttcctgattataaaagtacaatagctatgctcttacttgatgtagtcagcaccagtagctagtgatgtttagtcaaaaagttgtttaaggcagggcacagtggctcacacctgtaatcccaacaccttgtgaggccaaggcaggaggatcaagcaagactctgtctttacaaaaaataagaaaataaaaaacattagctgggtgtggtggcatgcgcccgtggtcccagctactcaggaggctgaggcaggaggatcccagcagtgaggctgcagtgagctatgatcacaccactgccctccaacccaggcaacagtgagaccttgtctctcaaaaaaatttttttaaggtgagaaatcataaaacacagttgatagaccttaaatattttattttaatttgaaatatttaaatatactataaatttgccagtcttaagactaagtccttttttttgctttgttaatgattacaagtttacttcctgcctctcatacaaacccatacccttaatttattgcctatagtttcaaatttgtgtttacctaaagtggtatgaaaactttaagctacctcagatacagtttagcacaaaaatcttttagatagcttcagttttttctctttttacaattgtgttacctctaatttatcagaaattggtttgagagactgactttccaaacattgttccaaacttagtttttttttttctttgggacagagtctcgctctgtcacccaggctggagtgcagtggcacaatctcggttcactgcagcctccatcctccatctcctgggttcaagcagttctcctgcttctcaacctcccaagtacctgggattacagccatgcaccaccatgcccagctgatttttgtatttttagtagagatgggatttcaccatgttggccaggctggtcttgtactcctggcctcaagtgatccacctgtctcggcatcccaaagtattgggattacaggcgtgagccaccatgcctggcctaacttagtttttataaaagcaacttctttttctttttgcactgggttttcaacagtttactgaacgtctgattaaatcactagttattatgacagtacagctaagagaaatacaactactgacttgtgattagcatataactcacccagaggatattgtggtagcatatgtgaaaacaacattcatctttctgtacatttccatcagagctcttagatgcctaggtgcactatcaatgagcagtaatattttgagaagaatctttttttttctgagcagtaggtctcaacagtgggcttaaaatattcagcaaaccatgctataaacagatgtgttatcatgcaggctttgcttttccatttataaagcacaggcagagtagatgtagcataattcttaagggccctaggatttttggaatagtaaatgagcattgatttcaacttaaagtcagcagctacattaacccctaacaagacagtcagcctgtcctttgaagccaggcattgacttctcctccctagctaggcaagtcccagataaagtcttcttccaatataaggctatttcatctacattgaaaatctgttgtttaatataaccacctcgatcaattatgttagctatatcttctggataatttgcctcagcttctccatcagcatttgctgcttcaccttgcactttttttttttttttttttttgagtctcactctgtcacaaggctgtagtgcagtggcacaatctcggctcactgcaacctccgccacccaggttcaagtgattctcctgcctcagcctcccaagtagctgggactataggctcacgccaccatacccagctaatttttgtatttttagtagagactggggtttcaccatgttggccaggatggtctcaatctcttgacctcgtgatctgcccgcctcggcctcctaaagtgctgggattacaggcgtgagccactgcgcccagccccttgcacttttatgttatggagatggcttctttccttaaacctcatgaaccaacctctgctcgcttcagcttttctttggcagcttcctcatctctttcaggctttatagaattgaagagtttggtccttgctctggattaggctttgacttaagggaatgttgtggctggcttggtcttttaccagaccactaaaactttcttcacatcagcaataaggctgttttgctttctaatcattcatatgttcactggaatagcactttaaatttcctttaagagcattttctttgcattcacaacttggctctttggtgcaagaagcctagcttttgacttgcctcagcttgtaacatgccttactaaactggatcatttctagcttttgatttaaagtgagagacgtgcgactcttcctttcacttgaatacttataggtcattgtaggggttattaattgacctaatttcaatattgttttgtctcagtgaatagggaggcctgaggagaggtggagagatgggatgatggcccagtcagtggaaccagtcagaacatacacagcatttatcaattaagttcactatcttatatagacacaattcgtgactcttcaaaccaattgcaatagtaatgtcaaagatcatttatcatagatccccataacacatacaataataaagagaaagtttgaaatattatgagaattaccaaaatgtgacacagagacatgcagtgagcacatgcttttggaaaaatggtactgagagacttgcttgatgtagggttgccacaaacctttaatttgtaaacgtaatatctgcgaagtgcaatcaagcaacttgcaataaaattaggtacgcccatattctgtataaaccacattgtttaaacagttaaggcacagtgagccactcttctttagggtgagctttgtgtcagtgtaagtaactgtttaccagctaaattctcagccaccagctggcaaaggtgcactaaggataggcagtcttagacttcatgtgttaactcttgtgcagtccttgatatgccccttcccccccaaaaaaaatcttcacccttatttagctctaaagtaaaaaaaattaacatgaagtggatcatagacttaaacctattagaatattgctgttcatttattcatcagtcttagtatatcattggtatataaaaataccttatgtagtgataaaacttgtcatatttgttgcaagtgtatgccagattgccatttgctttttttttaatatgatccttttacacttaaataataatttttggttactaaatctattgattttcttcctctgagatgtcttctattactttttttttttttttaagagacagagtcttcctctgttatccaggctggagtgcactagtgcagtctaactcactgcagcctccagctcctaggctcaaataatcctcttgcctcagccccatccccaaacgattgggaccataggcacaagccactgcacccagctaatttttctgtttgtttttttttttaaccttttgtagagacagggtctcactttgttgcccaggatggtctcaaatgccctggcttcaagcgatcctcctgcctcagtcttccaaagtgctgggattaaaagcatgagctaccgtgcccggcccatctttattattattttatctgtagaaagtccaaatccttccaatgaatattcactaacattttctttgaggtttttttttttatgcatttgtttttgacgtttagctacttaattcatcctgaatttgtatgataatatatatgaggagcttttcccccaagctaaccatttgttcagacatcattgcctccttaatgtgtactatgtatctctgtatgccattttaaaattttgcctgtagatttttgtgccaagacaaagtgtctttttattattattacacattcataaaatattttaattgctgttaggattaattttcctttgttccgttcctttcccctttcccctttttccgttttcctttcctttccgatggagtctcactctgttgcccagactggaatgcagtggtgcggtctcgggtctcagctcaccacaacctccccatccccagtttaagcgattctcctgcctcagcctcccaagtagctgggatcacaggcgtgcatcaccatgcctggctaatttttatatttttagtagagatggggtttcaccatgttgaccaggctggtctcgacttcctgacctcaggtgatccctcctgccttggccttccaaagtgctgggattacaggcatgagccaccgtgtctggcctgtttcttttctttaaacaaaaaaatttttttgatcaattctcatttgcttttactcacagatgaactgtataacctcttttccaggttccagaatgaaagttctccccaggattttttttttttttaagacagagttttgctctattgcccaggctggagtgcactggtgtgatctcagctcactgcaaccttcatacctcagcctcccgagtagctgtgattacaggcatgtgccaccacacctggctaatttttgtattttttagtagagacagggttttgctgtgttggccaggctggtctcgagctcttggcctcaagtgatctgcctgtctcagcctcccacagtgctgggattacaggtgtgagttacttcacctggcttccccaggattttactctgagcagttcttaactaagactaggacattttgggtgggaaaaaaatatggtcatttatattagggcatttaggactgtcaaatatggtctcaataggaaaaaactgagaagaggataaagaaagtgttatttttaagttatgattgtccagatcactagtatctctgttaaagtgcttatttcttctctttgattcctcttaggggttttatgatgttcttcgaaggaactctcagctggctaattcagtcatgcaaactctgctctcacaggtaaaatacatttttatggatatatggaaaacagaccatcaaggatcgagagacagttgatggttttcagacctttcaaaatataaaataattcccaactagtacattagtactttgtgaacatgctgtgggtatgttatgctgttctgggttgtcttatctcggtcaccacttacctgtctgccataataccatcatctagcagttatccttgtgaattaacagtctgtatcctaagtcagaaggacattttgaagaaccatttatataaggaccattgcaactgtatccattatgttatatttctgaaagaaaaaagaaatccaaaacaaatatagcaaaatattatttcttaaatctgggtaatggatacatggatgtcttttacattcctttctgcacttttcagttaacaaatttttaaattagaagattaaattcttctaatcttcaagactagaagaattcatatagagactctctaccaggagggttcctttagacccctagtctatcattttgtttgctgtctctcaatgccattgctttgtgatagttatgaaatttcatttaaaattaaggtctcagatgtgtgaaattattggaagttcccatactgtccatcaaaagcttttcatctggccttaggcttgatcctatataaaatttatattctgtcagctatattgtatctttcaaactgtaatcaacacatctacattcacacgtttaacaaaaatagaaaattatgtttgaaggcatagaatagcgctttctgactcaggttaatatgcaggacagtaaaattctgcagactccaaaagttaaaaggagaaaaataataactcatattttttttggctgtcttatatgccaaatactgtttgaagtactttacatgtattgtcatgtttaatccttatacaatgattattaataatatcctcatttttaagatgaggaatcacggtacagatacttttataaaaaccagtaataagtagtggtactgggatcttggactcagccagtctgactctggatcctgtatttttaacctccaagttaactgaaaatgttgattgcatgtacaagtttaggaatagaaggaattggaataggaaagatgatcctaatctgtacaatatccaaagcaagagcacaggatgtgggtgagccaaagaaataaaaacttggctgcattgttctttgaacagttgggaaatgtgtgttagaaggcattagacattaaagatacctttcacctgagaagttaaaaaagtaaaaagcatttatgagccaagatgtcttttttttcttactatacacagttaaaacagttctatgagccaaaacctgatctgctgcctcctctgaaattagaagcttgtattctgacccaaggagataagatctctctacaagaaccactggtgagacttttattcttccttcaaccattatttttagtattaaggatagggttgaactttgcaaagagatacctttccctgtgaaactctcttcctggttcttccaatgaatgtttacttttaagtcttccctgcttatcatttctgaaccattatcattttggatctattggtaagttatctccatgttagccctttactaaatcaaggcttccatcacttcccccagagaatattttatctcatttatgaatctttgattacattcactaaataaatgtactttagaatggggagagggatgatgtcacctacgaacagatgaacctaggggacctgcttcattagtctagaggaagtatatgatttaggctgaactaggattggcactgttgaaccttcagaggagctaggcctggttgactttctgttcttatctagcctcagaaggacagcgaagaggataaaaatggaaactcccaccccaagtgacttataactcatggcagaagaaaggaggaagtctttcagttgtcatatcttgccttcatttttgtgccttctgtgacatgagatgtcctcagcctagatctaagatgctgtgttggtctcctaaagattccctcaacataaacctctatctttagaatagcctctgggactcaaatgaactagagaagatttaacttcaccacctagctccagggttatttatcagaccagagatagcacatctaatgttgcattttgaggtgtcagccacttaggccaattttcggggggaagcattagaaaaggatgctgctgttcaattaattttcccagttttgttaatttagatggacttaatttgtaacgccaatgaatcattttctttagccttatagataagaattatttgctggttatgaacaactttataagttatccatcaacactcaagagtatttaatttacttattttctcctacaggattatctgctgtgttgtattcagcattgtttggcctggtataagaatacagtcatacccttacagcagggagaggaggaagaggaggaggaagaggcattctacgaagacctagatgatatattggagtccattactaatagaatgattaagagtgagctggaagactttgaactggtaattgctaagtcctcagctgtattgaatgatggagttctttagtagcttgttaatttttatcttgtgtcttttaggataaatcagcagatttttctcagagcaccagtattggcataaaaaataatatctgtgcttttcttgtgatgggagtttgtgaggttttaatagaatacaatttctccataagtagtttcaggtaaggttttgctataactccatttgtaatttgatgaattctccattttatttacatatttttactgtagcagtattctaggcagtaaacagaccacagacgatgacactgtctcttaaatgagcacctagtctaagactaaactgtgttctttccactagagagcgctgaagtatatgcttaccaggcctataaaatgaaagccttccagcagggtttcacttactcagaatttcccagaccctgaattcaagaactcctaattttaacatggaaattttgattggtggtagtattggactttaatactctgcagggactggtataaataagggaggggaggccaggtgcggtggctcacgcctgtaatcccagaactttgggaggccaagctgggtgtatcacttgaggtcaggagttcaagaccagcctggccaacatggtgaaaccccatctctactaataatgtaaaacttagccaggtgttagtgcctgggacctgtagtcctagctactcgggaggctgaggcaggggaatcacttgagcctgggaggcggaggttgcagtgagccaaggtcacaccaggggaaacaaaacccagatagattgctgtgacctgggagtattatattaatgaagttctattcatttataatgttacgtctaaaatatgacatttaaagaagcattgtgattattatcatatgtaaaagtaaaccacaatattctgatgtttgtccttagcggtctcttttttgttttttacagtaagaataggtttgaggacattctgagcttatttatgtgttacaaaaaactctctgacattcttaatgaaaaagcgggtaaagccaaaactaaaatggccaacaagacaagtgatagtcttttgtccatgaaatttgtgtccagtcttctcactgctcttttcaggtaaggttctgctagagtgcttaaagacagccactccctgaggatcgtatacctacctaggctcacttgtttcacctcgtttggattgtttacagtaagaaataagtcaggaggttttatttttcttgaaataaaagctggacaatcctaggtaggtactttaagtaggtaccttgaattattaaaggacaaatgagaaacagtgggccaataaatgaaaagatagggatgaattccagcagggtgttttaagaaaatctatgtaagtagcttgtacaagataacagatataaaaaggtagggggtgccaggcatggtgcctcactcctgtaatcccagtactttggtagactgaggtgggtggatcacctgaggtcaaaagttcaagatcagccatgaccgatatggtgcgacctcatctctactaaaaatacaaaattagccgggcatggtggtgcgcacctgtagtcccggctacttgggaggccgaggcaggagactcacttgaacccaggaggcagaggttgcagtgagccgagatcatgccattgcactccagcctgggcaacaagaacaaaattctgcctaaataaataaaaaggtagggggggtgactgaattaaaaatacaaagggacaaaaaaaaacctaaaagactaagactgacatttaaattttatcaaagtaaaggatttggggagggagagaaaatgaggaaccactaagaataacgattataaaagggcagccatagcagtgactatagcttgggctgcctagagagtctgccagtcggaacttactggcaagctctgttgggtgctgctgttctgaacaatttctagaaagcttaattccatataccaatagcagtaagggaatcttcctttttctttctctctctctgtctctctctagggatagtatccaaagccaccaagaaagcctttctgttctcaggtccagcaatgagtttatgcgctatgcagtgaatgtagctctgcagaaggtacagcagctaaaggaaacagggcatgtgagtggccctgatggccaaaacccagaaaagatctttcagaacctctgtgacataactcggtaagccactcccaccccttagaaacttattccacttggctgtggtgtctccaagagaacaaactgggaacagaggatgaaggtaatttgaggttggacatattttaggagtgaaagaatataaaacattagccaggtggcaggcacttgtaatcccagctactcaggaagctgaggcaagagaatcacttgaaccaggaggtggaggtcgcagtgagctgagttcataccactgcactctagcctgggtgacagggcaagactctcaaaagaaaaaaaaaaaaaaaaaagccagacatggcagctcatgcctgtaatcccagcactttgggaggctgagccgggtggattacctgaggttgggagttcgagaccagtctgaccaacatggagaaaccctatctctactaaaaatacaaaaattagcctggcatggtggcacatgcctgtcataccagctactcgggaggctgaggcaggagaattgctcgaacctgggaggcggaggttgcagtgagcctagattgtgccattgcactctagcctgggcaacaagagcgaaactccatcttaaaagagtgaaaaaaagtgcagtcattgacatagggtcttttttctagtcttgccttcccctggcgccccccccacctttttttttttgttgttgttgttgttttggctttttttttggctttttttgagagagtctcgctctattgcccagggtggaatgccgtggtgcaatctcggctcactacaaccccttcctccgaggttcaagcagtccttccactgcagctttctgagtagctgggactacaggtgcacaccaccatgcccaactactttttaatttttaattttagtttattttatttactactttttttggagacagggtcttgctctgtcacccaggctagagtgcagtggcgtgatcttggcttactgcaacctcggcctccccggttcaagtgatcctcctgcctcagtctcccaagtagctgggattacagggcaccaccatgccctgctaatttttgtatttttagtagagacagggtttcaccatgttggccaggctggtctcgaactcctgacctcaggtgatccaccaccctggcctcccaaagtgctgggtttacaggcgtgagccactgcacctggcccttatttttttttttttaattttctgtagagataggatttcaccatattgcccaggctggtcttgaactcctgggctcaagcgatacgcccatctcagcctcccaaagtgctgggattacaggcctgagccactgtggcttttgttttttcgttttttttgttttgttttgtttttgtttttgtttttgtttttccatttaaccctgagtggacacagcacatgtttcagagagcacggggttgcgggtaaggtcacagatcaacaggatcccaaggcagaagaatttttcttagtacagaacaaaatgaaaagtctcccatgtctacttctttctacatagacatggcaaccatccgatttctcaatcttttccccacctttcccccctttctattccacaaaaccgccattgtcatcgtggcccgttctcaatgagctgttgggtacacctcccagacggggtggtggctgggcagaggggctcctcacttcccagtaggggcccctcacctcccagacggggcggctggccaggtggggggctgacccccccacctccctcccggacggggcggctggccgggcagaggggctcctcacttcccagtaggggcccctcacctcccggacggggcggctggccgggcggggggctgacccccccacctccctcccggacggggcggctggccgggcggggggctgaccccccccacctccctcccggacggggcggctggcctggcgggggctgacccccacctccctcctggacggggtggctgccgggtggagacgctcctcacttcccagacggggtggctgccgggcggaggggctcctcacttctcagacggggcggctgccgggcggcagggctcctcacttctcagacggggcggccgggcagaggtgctcctcacatcccagacggggcggcggggcagaggcgctccccacatctcaggcgatgggcggccaggcagagacgctcctcacttcccagatgggatggcggccgggaagaggcgctcctcacctcctagatgggattgcggccgggcagagacgctcctcacttcccagacggggtggcggctgggcagaggctgcaatctcggcactttgggaggccaaggcaggcggctgggaggtggaggttgtagcgagccgagatcacgccactgcactccagcctgggcaccattgagcactgagtgaacgagactccgtctgcaatcccggcacctcgggaggccgaggctggcggatcactcgtggttaggagctggagaccaacccggccaacacagcgaaaccccgtctccatcaaaaaaatacgaaaaccagtcaggtgtggcggcaattgcaggcactcggcaggctgaggcaggagaatcaggcagggaggttgcagtgagccgagatggcagcagtacagtccagctttggctcggcatcagagggagaccgtggaaagagagggagagggagaccgtggggagagggagggggagggggagggggctcgtttgtttttttgtttttgtttttttttcatttaaagagatggggtttgcagtgttgcccaggctggccttgagctcttgggttcccagggcttctagtcttgctttgatatggattgttagtcacatataaaatgttatgctattattggggaaaaaaagagggatattacataatggttaagtgattcaaaatacttaaagcaaaaactgatggaactgaaggaaaaatagacaaatccttaattaatgtaatcagccctctctccatagtcaaaaaacagaaaacaaaacaaaaaaaaaccagtagatagaaaatctactgaaaggaggtagaagaagtgaacaacactgtcacccagcttgatttaattgacacttataagaacactccacagcaccttcaaaatacacacttctttttaggtgcacatggtgtattcaccaagatgagccatattttgggccataaaactcagcaaattaaaaaaaagtagaaattctctgaccaaacagaattaaagaagaaagcagtaacagaaagatatctagataatccccatatattagaaattaaatgcatttttaaatagcccatagtcaaaaagtcgtcagggaaattagaaaacatcttgaatagaatggaaacaaacagacaacatgtcaaaagatatgatccagccaaagtgctattgaggaaattaaagcagttagtgatttaaaaatctcagatctcccatataaacttccacattaagaaaatagaaaaagaagagcaaattataatgaaagtaatcagaaggaaggaaatagacaaaagcacaactatgaagaagcagaaaattaaaatagaaaacattaaaagaaagctggttctttgagaagatcaataaatttaatgaactttagccagactaatcaggaaaagagaagacacattacaaattgcagaattgaggaagaagggacatcactactgatcctacagatgctaaaaaatagataatagaatattaacgattttatgccagtaaacttttaagtttaatggacagatttcttgaaagctcactcaacaaaaaataggcaacctggccgggcgtggtagctcacatctgtaatcccagcacttttgggaggccgaagcaggtggatcacctgaggtcagcagttcaagaccagtctggccaacatggtgaaaccccagctctactaaaaaaaatacaaaaattagctgggcgtggtggtatgcacttgtagtcccagctactcaggaagctgaggcaggaagaccacttgaatctgggaggtgtgagtttgcagtgagatcaccccactgcactccagcctgggtgacagagtgagactctgtctcaaaaaaaaaaaaaaaacctgagtaatcttatctctattcaaaaaaacctgagtaatcttatctctattcaaagaaattgaatttgtggttcaaacttttttcacaaaacttaagatctaggtctattccgtggtaaattcatccaaacatttaagggagaagtaatgtaaattctgtgcaaattcttccaggaaataggagagaacatattccacctcatttaattaatgaggtcagcattaccctgataccaaaccagacccagaccattgcaagaaaactgcatagcaatatccctgatgaatatagagtctgctgtgttaaaggcagactcagaaggctatatactgaatgataaccatttttgtatgatgtttcgtagaaagtaaaaccatagggacagaaattagatcagtagttgcttggaaatgggaggagagaattgactatcagtgagcacaagggaacttttagagtgatagaaataccttgattgtggggagattacacaaccatgtaagtttttttaaacttctagaactgttcacctacagggtaagaattttactgtttgttattttatctcggtgaacctgtctttaaaaacaataccactttctcctgcttcagagtcttgctatggagatacacttcaattcctacttcagtggaagagtcgggaaagaaagagaaaggaaagagcatctcactgctgtgcttggagggtttacagaaaatattcagtgctgtgcaacagttctatcagcccaagattcagcagtttctcagagctctgggtaagcattgcagtatcaataaataggcttgatttaggtttctccttagctcaaccccttaattccatttgttaacctaccagaagacacttgagaacagtcctaatgttgctaaggagtgacatctagtggattcaggattggtacctactggattacattcaaccacaaagagtggctggaaaatggaatatagtattaagaaatcacaaaattttagaaatttaagtctgcctttagacttttttttggctttcaaaaattttagctattaaaaggccaaaaagtatgagtttatatcaaagaagacaagagtttcttttccattcctagatgtcacagataaggaaggagaagagagagaagatgcagatgtcagtgtcactcagagaacagcattccagatccggcaatttcaggtgagaagccttgcaaagctgctgtactggcctgagaggctttgcaaaggaactgttagcaggggcagctggtaagaatgggcagacagtgaccaagtaggagaagaattttttctgggtcatacaggcaacaggacatagctctcagaatggaagataatgtatttaaaaggaccctagtgaggataggtatttagccaccccaacctgcaatactcattacttctaaggaccactgtttgagttgatgtaaacagaaaggagtcttcaaggcatagagtctgtgtttttgttttctgagtctgtggtataatttggcttggtctgacagacaacgtaaacactggacaataaagtttgttagtttctaaccaatagttgtcaaaatatcaggatgttctatcacaggagttttttatttaacaagtaattctgaagttcctaccatgtgccagaaacagttctaggtgctggggatgtagcagggaacaaaagagacaaaatattcctatccttatggagcttacattatagtagaaagacactgacaaataatcaaatacatagttatttcaggtaacagggaaggtatataagcattgctgggtttggtgccttgtctaagcctgagatcaatggataggctccagggagctgtgagccaccagaaattgggtacatagttcattatctacattttgcatggggttggaacggaaagagtcagttttcaggagcattctcagagaggtttatggtcaaaaacagcttaggaaactactgctcaattcaggtgtattttcagattttatcctcttagaattttggtagctttgaattctttctgtcctagtcttaggagtctctgactagatgcctcttcttcctgataggaacgtgtctgctaacattgcttgctgtgtgtgccttcctttctcagaggtccttgttgaatttacttagcagtcaagaggaagattttaatagcaaagaagccctcctgctagtcacggttcttaccagtttgtccaagttactggagccctcctctcctcaggtactagtaccgctaacttaatcccatttagcattcctcagaaggcaaggattattgcatcataaaagtgtatatctaaatgtcctcttgaaattgagcttattttacataatgtgtttaattatacacctgagttaatataagacctataagatgtattctttcctgtgtaatgcgtctaccacagcatacttacatgcagccatacagggcaagaacatactgcttttgttttgtttgttcagggtagagtgaaacaccacagaaagaatcctgtgttgatctttggtgccttcaaccttcttaaacctgtgttctttgccactcttggtgtttacttcttttctaagaagaaaatttgttaattatgaagaaggcagttgacattcagcagttgactttctcagcacagttacctggtactgactttggaggaaattcaaccaaagatgattaattcagaaagtgtaactatagtcccaaagcagaaacacctctgcagagataggttgtatgtatgtttgtgtaagtgtgcacacgtagatgtagagctgtgtacccacatgagcgttcacacacagaagaataagagaaggaccacttgttgggggtctgtaccattcaggagtaattttcctgtaggatgatagagtaccttcaggagcccaggactgtgtgctcctaccacatctacttcctgggcttgagaaagacaatgaagccctgcggtatactcctctttatgtgagcccttgcctcagaagactgtagcctgggagtatgaaggcgtttgggcactagaaagcagagctgcttcctgtcgtcctacttccaggtttgcccaaagaaagtccctttggttacttcatcccagttccaaacagctcacccccactttgctctcatcatcgttctttcatactgctgtttttgctgcaaagaggaaaggactgagaaagaaatagctaattggggcagggggaaatttgagagaaaataaatggatttaggaaggctaaaatgttcaggaaaatttaaaaatttttcttttttaaacttttaaacttttagatttttaaacgttttaccacctaccccttctcccttaacttcaggtagtctctttaaaaaaaaattttttttttttttgagacagagtctcgctctgtctcccaggctggagtgtagtggcgccatctcagctcactgcaggcgccgccttccgggttcacgccattctcctgcctcagcctcccaagtagctgggactacaggcgcctgccacaacacccggctaattttttgtatttttaatagagacggggtttcaccgtgttagccaggatgatctcgatctcctgacctcgtgattcacccgcctcggcctcccaaagtgctgggattacaggtgtgagccaccgcgcctggccaaaaatttttaattttaattttgaatgggtaataaagtcctatgatttgaaaaccagagattatcaagagatttatggtaaatggtgtcccccacccatgtcctccatctgttcagttcctcctctccccaaataagtaaacacctttagttttttgtgtccttcaaccttctttattcccttccaagtaaatatagagttttattcccaatcctacccctcttcacacaaaaacttgttctgcatcctgcttatttcattgagcacggtattctgaagatcttttaatatcagtttgtagagagctttcagttagcctcttaatttaccttttcctcaacagatcaaaactgcatttttgttagtcatttacacttaagtataacggcatttcggtgcctttgtagctgaaagaactgctgaagcagaaagttgactgtgtgtctggtgatgcagatgcttgctatctgaagaccttaagtctccttcacttagctaagaaaatgctgtctggtttcttgcctcttttatttctcttttttctgcccttctctcttctaacctcctttgttcttttggcttctaaatgctaattctactgttcttatagctaggttttctctttcccacacctttctgataacctaatatcctcaagtggagagtctgggggcatgggaaagaaaagagggcgctttagccctagaccactatggtagaagcagaggaagttcaggtgtaaggaccctaaaacttttggacctcagtaaggacatagacattgagaattaaattatatattattctcataattcttagaattttggacttatttttatgcccttcatcatatattaccacttgagatctaaggacatgttttggcagctgatttgcttagatatggaaaggtctagaactcttctgttctgacaacacctaggtctatctctggcatgtttctttaatatctgaatgatctctaatttagtttgtgcagatgttatcctggacatcaaagatttgcaaggaaaacagccggggtaagtttactgccatgttttcctaaaggctttatataaaatcactatcctccagtggcatttggaaaagaaaaggtattccccattcattacacattcaccagagtggccaaaatgaaacagacacctaataccaagtcgaattgttggcaagaatgtagagtagttggacctttcattcactgggggtggaggtagaaattggtataaccactatggaaaactgttcagcaatatctactaaaattaaacatatgcctatgactcaacaattcgaatcacaacagaaaaatgtggaagaattctcttagcagcactattttagtaggtaaaacaaacctaagtgttcatcagcagtagaaaggataaaagaattatgatatattcacacagtggaatcctatacagcaaataagcatgaacaaactacatgtacacacaacttggagaggatctcacaaatgtactgtaaaacaaaagaagccagacacaagaaagggtacttactgtagaattccgtttagatgaagttcaaaattagacaaaatttatctgtgatgttagaagtcaggatagcagtttccttggcggggcaagttaggagggagtccctagaatactcgtaatgtacttgatctggatgctagttacacagtaatcttaactaatgatgggaaatgtctgccttctttgggcatgtggataaagaggcatcattgcagactagctgcttggctgtagtatgtgtaacactgggatgttgtgcctgagacacgacaagctacctcctgttctggttaggcactccaccccacacaccctgtacacatacctgagggacctgactgggttataacttaacttttttttttttttttgagacagagtttcactcttgttgcccaggcaggaatgcaatggcacggtcttggctgaccgcagcctccgcctcctgggttcaagcaattctcgtgcctcagcctcccaagtagctgggattacaggcatgcgccaccatgcccggctaattttatatttttagtagagacggggtttctccatgttggtgaggctggtcttgaattcctgacctcaggtgatccacccgccttggcctcccaaagtgctgggattacaggcgtgagccactgcacttggccacaacttaccttttaatttgcttttcttcctattcctagaggatgccttgttttgcaagagcttgatgaacttgctcttcagcctgcatgtttcgtataagagtcctgtcattctgctgcgtgacttgtcccaggatatccacgggcatctgggagatatagaccaggtactataatgagccttcagtacaataccctgtgtggggatgggggtcaagggaacaaccttactgtcattaggtctcacctctcttcttttccccaggatgtagaggtggagaaaacaaaccactttgcaatagtgaatttgagaacggctgcccccactgtctgtgtaagtgttgtacctgagccatggggaatagctttgtcattctttccattctactccatgtgaagtgacttgtgtcctatagcggcttgtgtcctgaggcctgtaacccacctgtaggtggccaggtgaccacagttattatattacccccacagctgtgtgtagtgaatcacaccaggcactcttttctttcagttacttgttctgagtcaggccgagaaggttctagaagaagtggactggctaatcaccaagcttaagggacaagtgagccaagaaaccttatcaggtaagataagttcaactgggattccaggaattgacatgagcaaggtcaaaattcatattgggtcggtgcataaaaatggagcccctgagctaaatttcttatttgcctttaagctagattttttcctatgtgatgaaagaagtagaagatcatatgtcttatcacagcacgattaattcactctgcatattgaatgttcgtttttccataaagactttctagttagtagtaatcaatttctaaatctcctttactcttaattagaaaacgaagttgggtttgaatgtgccaattttatttccctttagaagaggcctcttctcaggcaaccctaccaaatcagcctgttgagaaagctatcatcatgcaactgggaactctgcttacatttttccacgagctggtgcagacagctctgccatcaggcagctgtgtggacaccttgttaaaggacttgtgcaaaatgtacaccacacttacagcccttgtcagatatgtgagtatttgagacaagcagattcgccccaccattctaccccagtgagccaggagatgaggatggggcagcagcccactgctgcagaatgcccctaaacaagagagcatttgcctccatcttggcaggtcatggtttcattttagtttggtcagtaggtggcaggcatctccacaggccagggaaaaacagtttataattctaatctgcttttgggcctgtcacggtggttcatgcctgtaatcccagcactttggtaggctgagacgggcggatcacctgaggtcaggagttcgagaccagcctggccaacatggtgaaaccccgtctctactaaaaatacaaaaagtagctgggcgtggtggtgggcacctgtaatcccagctactcaggaggctgaggcaggagaatcgcttgaacccaggaggcggaggttgcagtgagctgagattgtgccactgtactccagcgttggcaatagagtgagactccatctcaaaaattaaaaaaataaagtaaaaatctgcttttggaggcccttaattctttggcatgtatgtggcacctgattgagaatgaatgcctcttttaaataccttctaaggtttaatctaaactataactatcctagaattaaatctgggcccataatgcatagaaattataccatttctaaccagtctggacacttaaagagatgtttattccttttttcattcctttaacatgtaggtgttaaatgccttatagatcaaatactaaggtggggaagaaaattattttttataaaaatacaaggcataccctgcccttactgtttatgttcctagcaatgatccatattaaatacttagaaaggcacagataatccaagaaagatgtggaccaccccgcatcacagcagtgtggctctctcagaatgtgtagctctagctacatgtggctaagctgctgtagtggaaatactgagagcctcttctctttattggcatctttaaaaggaaaaacagcaaagttgttggttttttacatgcagggactaccagcctgaggaatttttaaagaaatgagcaaatcagaaacaaacccttcattacttattgtctgggaagcttaggagctttggaggagaggaataaggaagcttgtgtcttggcttctctgtgaattttgtttttcctcttcagtcagaatgatgagtcacactccataggctcactgcagcagtcacttgtagtttcataggacagtctactaaatctaggaatctttttttattagtatctccaggtgtgtcagagctccggaggaattccaaaaaatatggaaaagctggtgagttgagaatgcctttcctaggaatgggggaagcacttttactgctggttacattggtttccttctcccttgttgtgcaggtgaagctgtctggttctcatctgacccccctgtgttattctttcatttcttacgtacaggtaagagattcagaggcagtacccaataggtcttcaagaaaggatttcttacatgcccaggggactattgatcacctgaactgagcatatataaacttttttccctgcttaccacaagctggaggcacccatcagagaccaagccaaggcttgagggctttgcagcaaggacatctttatgtaaagaaaactgtttcacttaatttggagaaaggaagcatatatgtttgcatttggagcaaggaaggaacaagcatgctcaggctcaaggacttggtttattcctgggtgactgaaagtccatgccatgaggcatcctctgggaatgtgagcagagtagcagcaagcacatgaagaagggttgtgatgagacggcagtgcagtgagggcactttcagggaagtggaaggacgtggctttgtaagtgtcatttggtcctaaataccatcagattcctgcagtacttgaatctcctttactgtttgcttaaaccagttttttaacctcaccactattgacatgttgcgctagataattctttgttgtgggacctgttctgtgcattttgggatgttgagtagcatccctggcctccacctaccagatgccagtagcagccccctagttttaacagccaaaaatgtctccagaaattgccagttgtccttaagggacagaatcacccctcgttggaaagaggaagaaacgagagatctactgtctcctaaggccacttagtcatgcagtaaatgtatcacagggctgttactgatctttgaggaatcaaagagaatgggtccactaagtgtcaatctcagccaagattctagaaccaattattaaagcaatggatcgtgaccactttggtagtgatgcttcacttgttttctgcctctgcatcacttacaggcacaatatcattctatcagtaacttgcctcattatgtgtattcagggtgcctcttcccctccctttaagaatcagcaatcagctgggcacagtggctcatgcctgtaattgcagcactttgggaggccgaggcgggtggatcacctgaggtcaggacttcaagaccagcctggccaacatggtgaaaccccatctctacaaaaaatacaaaaaattagctgagcatgctggcgggcacctgtaatcccagctacttgggaggctgaggcaggagaatcgcctgaacctggagggcggaggttgcagtgagcaaagatcgcactgttgtgctccagcctagcaacaagagcgaaactccgtctcaaaaaaaaaaaaaataaagaatcagccatcaagtgggctgtcatctgggtttagctgaaggagttcttagtaatgggctgatagttgagactctctgtcaccttgcctttgtatcagttttgtgatctgggtcaggaatgcatcatccattttctatatccagccatccagccagtagtcaactgtcataaagctattacttctggtcctctccttttatctcacccaaatgcttgcaggaatgctttctcaaacctcatgcttgtaaattttcatgtgggtgccattcgtcaaacaaatctgttgtctatatataggatatatatctgtccattcccatatttgggttttgagtttcctcatctccaagtcttaatgatacctataaagacacatttcacaaaatatgctatatagactgagacagtcctcaaaaaaaaaaggaattcagggagagatgctcataccgtatatctctcaccttagagattcgtggtgtccatttgcatattaaaggtgctgagaccagtcatggtggttaatggaggctgaggtaagaagatcacttgaggccaggagttcaagaccagcctgggcaacatagtgagaccccgtctctacaaaaaatttaaaatttaagccaggtgtttgcctatagtcccagttacttgggaggctgaggcaggaagatcacttgagcctaggacttgaaggctgcagtgagccatgatcatgccactgtactccaaggcaacagcgtgagaccctgtctcaagaaaaataaaaacagtgctgagagttccaacagtatgttcattagtagttttcagacctattcaagaacatttttaaaaaaataacaaatgttactatttggcagaataatgttccatagagtacagtttgggaaatactgctgttaaatgctatttactacccttgttatgattcaaaagtcacattgtctaataattttattagaacaggtaatgcttagagaacctctaccttgtgtctgatgtgttaagctcttttcatacatcatctcattcatcctagctataggttatgattagtagttatccccatatgcatgatgagaaaggttaatcagaatgcccaagaacagaccatgagtaaaaggcagatctgagacttgaacccagctagttagactcgatagcaggaattggcacactttttctgtaaagggccagatagtaaatgtgggtcatacagtctctatcacacctactcaactctactattagaacataaaagcagccatagataacttacaaataaacgagcatggctatgttccaatgaaattttcttatcaaaaacaggcagtgggccagatttatactatgggctatagtcagtcaaccattgctctagagtcatacctggtacttgttgacatgtaaaatgttggaaggttttgattttcgtgtttctgaccccattttcaagcattttcttctgggaatcactactacttcctagactgctattattttcccctcattacacagtaatcagtttcatttcctccctaggcattttcctcctcctccatccatatttgacttaaagccttactgacaagtcagctgatctgcaggcaaacattttacatttttctgtttttgtgagatgtatttaatgagtgccccctgggcaagagcccatgcatggttccattaactccagctcttaactagaaatggggattgcattttccacacctctcagtgaactgttaattctcttgtagccccctcttcatttccccagttccttagatctcaatgggaagaaagcaacgaaaaccattgctgcaactcttagcatcctgcccagaactgtatacctttaaaagatgcttctcaagggtcggacatggtggctcatgcctgtaatcccagcactttgggaggccgaggtgggagaatcacaaggtctggagtttgagaccagcctggccaacatggtgaaatcccgtctcaactaaagatacaaaaaatagcagggcacggtggctcacacctgtaatctcagcattttgggaggctgaggcaggcggatcacaaggtcaggagttcgaaactagcccggccaacatggtgaaaccccatttctactaaaaaaaatacaaaaattagctgggcatggtggcaggcgcctgtaatcccagctactcgggaggctgaggcaggagaattgcttgaacccgggaggtggaggttgcagtgagatgagatcacaccactgcactccagcctgggcaacagagcatgactctgtctcaaaaaaaaaaattagccgggcatggtagtgcgtgcctgtaatcccagctactcgggaagctgaggcaggagaatcgcttgaacctgggaggcagaggttgcagtgagctgagatcgcaccattgtactccagcctgggcgacagagtgaaactccacctcaaaaaaagatgcttctcttctggctctaattttagtcctgcccgcccggatcagttggaatgggcagggaacagggttgatctaaggagttccaacagggccccatcttggacacaacctctgggaagatggttcacttcccacttggtcagtgaggtcgatccgtgactgcttccttgccctcttctgctgccttcaccctcttccatgctctaccctgccttccagggccaaaaacagattactgcataccagcccctctggaatgtctgcagttccttattttccagaacgtggcatgtggaacaagtctcctgtttctctcatggctccagttgcagagcctctctgtattttcaggtctgtttctttattctgttgccctcgtggagcatggtatgttcccttcctaagaaggtttagaactccccttgaggtaaaaagctgcctacatttctgtaccgtaccttacatttgggtggtttttctccccagtctctcctgactcaagtcttgattttcttttgctttatcagaatcttacactttttggttccttttattagttattcatccctctccaggagctctttattacccaataatttacaacacagggaagtgttctgtgacccttttaacccttcttgagcatgataacccattgcacataaaatatatctggttttggctttgctgagtaacgaaaataaaatatatctggtgattgcctgtaagtgggaagactgcagggccctgcagcagcctcctcagcttcctctcctttatgggatccttctagcccactggctaaaatagaaatagaaatgaatattcctgctaccaccttgacagtccccattttaaccattctttagtacctcaccagccccttggctgacccactgcagtaatagtcctgccttcaacttccatgtgccagctctaagaacaacagattgtaaacctctcaacaactaaaaaagaaaaaatatctgaggattacaaagcatccattttttccctatcttctaacatctgttgcacagatagtcctgtttactccagacttggtcctcataccctgtgtaattaccttctaagaaaattgccactagttggtgggcatggtggcttaggcctgtaatcccagcactttgggaggctgaggccggcagatcacctgaggccaggagttcgagaccagcctggccaacatggcaaaacaccgtctctactaaaaatacaaaaattagctgagtgtggtggcacgtgcctgtagtcccagctactcgggaggctgaggcacaagaatcacttaactcggggcgcagaggttacagtgggtcgacatcacgccactgcacaccagcctgggtgacagcaaagctctgtcttaaaaaaaaaaaaaaaaaaattagcactagcatgctagctccacagaaaaatcatcaggaataagagaatgtgtttctatttctttagaataagagtaagagcctgaactatacgggagagaaaaaggagaaacctgctgccgttgccacagccatggtaagctgctgacactgaccgttaaaatatgcttgttggtgaacccgaaaacatgaagcggaagaagccagtgacaaaaagaccacgtgttgtatgattccattttcatgaagtgcccagaataaatcatctaaaaaggcaaactagattagtggtagcgtagagctaggtgggttggaagatggggagactggggtgacagctaaaaacggtatggaatttcttttgggggtgatgaaaatgttttagaattgactgtgatgatggttgcacaactctgcaaatactgaaaaaaaagtacattgtgagtgaattgtatggtatatgaattacagctctatcaagctgttagaaaaaattgtgtgtattatatacatggctgcttctcaactcagggattttatgatcagatggagcatcttatttttcctctgaaccaaaaacatgttttattcacgaagcaccagaaaatcttgagttgaaatggaaatagtaaaataacttacgatactcaattgggagaaattatttttaggtaaagttggtgaatgcaaaaggtgctccctaaaagatgtgtaagagtcagcgggggtacaggaaaggaggcacttagtacattgctggcaaaggtgaaaattagtacagcctctccagaggcttagcaatgactactgaatcccattctgatgtagcagtttcacttttaggatatacaggcctgtgtacaggatggtcctcacaacattatttataaaagtgaaatattagaaacaaagatatccattaatagaggactggctaaataggttataatatatttatactggagagatatgaaaaaaataaacatctaaatgttcagctctctggaattatctccaagataatgttaaaaaaaatttgtacagtatcctcatgggttaaaaatacacacacacacacacacacacacacgtaggacctacaaattacaattcacgttagggggaaagatatataatcacacacacacacacacacacacacacacaaatgtaggacctacaaattacagttcacgttagggggaaagatatataatcacagacacacacacacacacacaaatgtaggacctacaaattacaattcacgttaggaggaaagacacacacacaaaaacgtaggaccacacacaaaaatgtaggacctttcgttagggggaaagacacacacacacacacgtagaacctacaaattacaattcacgttagggggaaagatatataatcccagcagtgaaaattcatacccagaccagaacaaggaaatagagctagggccaaaataggcttaagaatttcaagtcagaaaagcaactaaatttctacaagtgatcctgccctcctcagccattttctagataacaacaaatactggaattataaatgaaatggatcagtgcaattatctctactggcatttgggtccttccagattgaactgccaaaaattttagattactggtatacaactgcatttgattgggagacagactagttttcccctaaagccatacagttttgtaagtgacagcttcagaggaaaacttcaaaaaccattgaacctgaaatttaagtcttatgttctttgcccttaggccagagttcttcgggaaaccaagccaatccctaacctcatctttgccatagaacagtatgaaaaatttctcatccacctttctaagaagtccaaggtaaacattctcttattatgtgctaccattcccatttaccttcttgacagatctggcaaactgaagcagcacaactacaatggaggaaaagagactctgggccatttgtgtgtttgccatcccccctctccccccccccccctttttttttttgagactgtgtctcattctgtcacccaggctggagtgcacattcaagtgatcctctggcctcagcctccagagtagctgggactacagtcatatgccatcataccccactagttttttgggtttgtttttgtagagatggggtctcactatgctgcccaggctggtctcaaactcctggcctgaagtgatccttccaccttggcctcccaaagtgctgggattacaggcatgagccaccacactcagcctctttgctgttcttgatctgatgacctgaaccccagcatacagaaggaagtgggtgcgtgcttgctttaggtagaaatggaaaggtttctcagaggtgaactaaaaatggcttaagctgttctggcaggacctatgagtagggagatgtcccatgcttacaatcttgtcataggtgaacctgatgcagcacatgaagctcagcacctcacgagacttcaagatcaaaggaaacatcctagacatggttcttcgagaggatggtgaagatgaaaatgaagaggtcagtgctggcttctgtctggagcccagccactcttcctagctggttagcagcctatctgggagcagtcacagattagtggaagggcaacagaatgggaaagggctaaaaggtgatcaggcaaagatgagagcaaaggactctcagaagggttgtaaactttggaccacacaaaatcctatgaagttgccccgacttgtttgataaacacttccaggaagcaggtggtaacaaaacaatgtcctgctgtgggtcctcttcctgttaatcttttaaactactggatgatgaccagctatagcagtctggctcagaaactagtttacctctcatgtcatgccctcattcaaaggccactcattagtttgggttaaggcttcttccttcaattcatgccaatgtcttgtccttttcccttgtggtttgttcctctccctttactcttagcaagtgacagtaccgcatccccatccctgcaccacctttgaaacagaacccaatgtttccttacttctagcacctaaaattttcatcttaggtttgtctaataagtagcaaatcagtagcccactcccatttcaaaactggaagtttacatacaagtgccctggatttcagaattttgaacatgcattcttcagatgatcacactccaggctctaatgtacctggccccatccactctctttacccacttggcagctgcactcaggagagtcatgtagcattttgatgtcaatggcttcttctcttgtcattttgtcccataagtatcctcagtatagcaaaagtcctaaaaggaggtgccactgtcttattactctacactttggaggactccttcctcttcttcaacaacataattacctcctgtgagtgggaaagtggggaaagcatgactaacaaaggctttgatgagaagatagagtcttttttttccttctttttatttccactgccttggagcaggtttatcacgttagagcattaattctttccccttctagggcactgcatcagagcatgggggacagaacaaagaaccagccaagaagaaaaggaaaaaataaatgaaatgcctgagttaatgtgaactttggggcttctgcttcatttttacccaacaagcaacaatgccccttgtcctgtagtccacaccgatgttggcatcttggttctgaacccactgaattcaactgcaccttcagttagaaggaatcttcttggcaggtcctgctactgaaaaatggctggccttaggcaagcccttttgcaaaaagcacagctgaaagcctgagtttgggagcctgcaccaccccgatgaagctccacgggagcaaatacagagcctccaggcagtgctatggtccaggctggcttcgtttttccaaggagcctttggtgagttcaattatctggtaaatatccagcgcttcacctgaaagatagtgcaaattggttaggatgccacctcaagaactgtaactgagagctcagaagtgagcaaaggagcttaatgctaaggtcaaaaggagagtgaaaggttgagaacaattgccacgaacggtaatgttacatgttaggagggtctgttttctttttatataagtgtgtcttagatatattttaaatagaaaataagctttctgatttacttgtttggtatttaaagcacagtttgtttttctgtcacctatagagtgcaagaatgcactctatagaataaattatctttaaacatt

SEQ ID NO: 93 - DNA, 10300 bp, Homo sapiens
cgcgcaggcgctggtaccccgttggtccgcgcgttgctgcgttgtgaggggtgtcagctcaggtaagcaaggagagtattccggttccccatctgaaagaaggtacactggagaaggtcactgagtcttggggggaaggagtcctgtttccgcctaatatgggagttttcgtctcctctgaaaggagagccttagaaaagccactgttgagcggagggtctcaccgtatctttgcatgaaatcgtggtcagagctcccccgagccgtcctcctgccacagcagggagaaatttgccactagaagggacataacagcccagtacttgctgcgggttgtgcactggctgttctttttttttttttttttttttttttttttgagacggagtctcgctctgtcgcccaggctggagtgcagtggcgggatctcggctcactgcaagctccgcctcccgggttcacgccattctcctgcctcagcctcccaagtagctgggactacaggcgcccgccactacgcccggctaattttttgtattttcagtagagacggggtttcaccgttttagccgggatggtctcgatctcctgacctcgtgatccgcccgcctcggcctcccaaagtgctgggattacaggcgtgagccaccgcgcccggcctgttcttttgtcttcttcaacatctggtccaaacccacgtttcgttcattaattatccaaatttactgcagacttgatacaaaaaaagactagggacctgctgtcaaggaattcctcctaaggagaagaaactgtcaggtgaattagaacacgatgcaaatagatgtagacgcacagagggtgacgttggaaaggtgtgagtggtggggaggcattactggagaaggagttgtgatttaatatgtaacctttaatatctaaaggtgtgaaagaataaaacttttatgggcagcaggaatagtgcagtgtggctgaagcatgagtttgtggagagtagatactggatataaggcgggatataagggttagattgtaaagaacctttataccctgaaaaataggcagttattcatggcatttgagccaaagaatggcatatgccaattttggttaacatagtgaggctggagtctggttgcttccttgggagaaattgtcttgcttgttctaatccttttaccatggctttccactgttctcattttatataaaggtatactttatacttgtgatacttttactgtacagtcaaccctctgtatccatgagggatggttccaggacatcctgcagatcccaaatccaccaaaggtcaagtcccagatataaaatggtgtagtatttgcatataacctatgcatgtcctcccatatactttatatttaagagatggggatatcctttgttgcacaggctggttctttttttcttttttttttttttaagaaagggtctcgctctgccacccaggctggagtgcagtggcgcgatcttggctcactgcaacctccgccttcctggttgaagccattctcctgcctcagccttccaagtagctgggattacaggcgtgcaccaccacactttgctaatttttgtatttttaatagagatggggtttcctcatgttggccaggctggtctcaaactcctgacctcaaatgacccacccaccttggcctaccaaagtgctgggattacaggtgtgagccaccatgcctggccagttttgttttgttttgtttttgagacagagtcttgctctgtcgcccaggctggagtacagtggcgcgatctcagcccactgtaacctccaccttctgagttcaagcctttctcctgcctcagcctcctgagtagctgggattacaggcctccacccccgcagctggctaatttttatatttttagtagagaggggatttccccatgttggccaggctggtctggaactcccgatctcaagtgatccacctgcctcagcctcccaaagtgctgggattacaggcgtgagccactgtgccaggcctcacaagctggtcttgaacctctgcatgtcctcccatatactttatttattttagagatggggttctcctttgttgcacaggctggtcttgaacccctggcctcaagtgatccttctgccttgatctcccaaagtgctgcaattacaggtgtgagccaccgtgcccagccccacccccatatactttgaattatttcttgattacttataatacctaataaaatgctaagtaaattgttgttacactgtattgtttagggaataatgacaagaaaaaatgtatagtacgtgtttggacgaagatgtttttttttttttttttttttttgagacagagtcctaatctatcgcccaggctggggtgcagtggcgtgatcttgaagtacaaaacacttccagcaaaaaatctttatttttaagaaaaaagtattttttctcattttctatttttgtcataaatttttattctttccagtggaaccaaaacttgaacttccttttggttgatacatgcccagcaagactgatcaaagaaaagatggcacagataaacagtgttagaaatgaaaatggaaacataaccatagataactacagattaaaaagataaaacattatacaaataaattgaaaattgcatgtaatagataaatttgtggaaaaatttaacttgccaaaattgatgcaagaataaataacttgaataagattcaagtaaattggatttgtaggttaaaattttctcaaaatgaaaacaccaggatcagatggagttattccagacaacctagtaacaaattatctcttggactaatccacaatatgttaaaaaaaaaaaaaaaaaaaaaaaggaggcaatactccctaactcattttaggaggctagcataaccttgatagctaataaagacaaaattagaaaggacagttataggccagtcttactgattagcatagtgttaaaagctttccctttaaggttagaaatctgacaagaatgccaactatcagcttttctttctttcttttttcttttttttttttggctgttgtttagacagggtctcactctgcctcccaggctggagtgcagtggcacaatcatggctcactacagcctcagtctccccgggctcaggtcatcctcccaccttagcctcctgagtagctgggattacaggctcatgccagcatgcttggcccagctatcagctttttcatttaacattgtactagaagttactgtcagaatagaaggcaggaaaagaattagaagggaagaaataaacttgattatatgtggatgacatgattggcagtgtggaattaccattcccagactgctccccaccccaaatagattcatcattagcattactaaggctttggttaaaaatcagttagattggctgggcgaggtggctcatgcctgtaatcccagcactttgagaggctgagatgggtggattacctgaggtccgtggttcgagaccagcctcactaacatggagaaaccctgtctttactaaaaaaatacaatattacctgggcctaatggtgcatgcctgtaacgccagctactcaggaggctgagacaggagaatcgcttgaacccaggaggtggagattgcggtgagccaagagcacaccattgcactccagcctgggcaacaagagcaaaactccatctcaaaaaaataaaaaaaaatcaattagatttacatgtatcagtaagaaatgggtagaaaatagtgtttttgaaaagatagcaaaaatataaatacttagaaatcagtctaacaaaaattagataaagctttatagagaaaattataaaacctttggaaagcatcaaaaaaaagactgaaacagcgtgttcatggatcttaggattcaatatcataaagatatcagttatctccaaattgatctatagcatcaataaaattacaatccaaaccacagaaccctgttatgatttggattataatttcagatatacatatttatgtatatatttatggacttatgaactgattctcaaatttatatggaagagcaaagagtcaagaataatcaagtcattcctgaagaaaaagaccaggtggataagctatagtaaaacatcacattgtacaccttaaatatatacaatttgtatttgccagttatacctcagtaaagctgggaaaaaatttaaataataaaaaatgaataagctatagtaattcaaacagtggagtattgtctcagaaataatccacttgaccagtggaacaaattcaagagtcccaaaacaaatccacacatatagaaatttaatttatagtaatatcagcagggaaaggatggactgattcagtaaatgatgttagaacaattgactattcatatggggaaaaactttaaattggacccccacctcactcactatacataaaattcaattcctagtggattcaatatttaaatttgaatagcaaaattataaaatatttgaaggctatgtaggaatatctctacatttgggggtaaggaaaaatttaatacacaaagtataaatgtaaagaaagagattttaagattgattatgttaagagtatgtgtttattgaaagacaccatgtacaacatggaaagataagcacaaactgggggatatttgtaacacattaaaggattggtgttggctgggcgcggtggctcacgcctgtaatcctagcactttgggaggctgaggtgggtggatcacgaggtcaggagttcaagaccagcctggccaagatggtgaaaccccatctctactaaaaatacaaaaagtagccgggcgtggtggcgggcgtctgtaatgccagctgctcgggaggctgaggcagagaattgcttgaacccggaaggctgaggttgcagtgagccgagatcgcaccactgcactccagcctgggcaacagaccgagactccgtctaaaaaacaaaagggattagtgtcctttgcttggttagtaaagagagaactagagttgagaagagtgttgggtgaatatgtgtgtaggtgttggttttaggtgagagagactttgagcatatttgaacattgagggtaagaaagatggaataattgatggaatggtatccctgaagattgggagaaggtggaatccatagcacatggagagaaactcggacatttaacatttgtttgtacctgagaatgttgactatctctaccattcttgctctcacaaagcatatgtagacttcctcacaacagcaaatatttgtcaaatcccttactatgacaggcatgctaaggctacaatagtaagcaaaatcagacccaggcctggcctcatgagtttataatttatcagtggaaacacccattatttaaaacctttagtgtttttattttttgtagaactttttgcatttttagttctttattttaaaaatatatttgcttgtatagataaacgttcacaagaagggagtggaaaaactcagattcccttgtcagaatagagattaataagaggaatcttggactggcgtggtggcacacacctgtacttccagctacataggcggctgagatgggaggatcacttaagcccagcaggtggagattgcagtgagctgagattgtgccactgcactccagcctgggtgacagagcaagaccctgcctctaaaaaaaaaaaaaaaaaaaaaaaaaaaagctgggtgcattggctcacgcctgtaatcccagcactttgggaggccaaggcaggcggatcacctgaggtcaggcatttgagaccagcctggccaacatggcgaaaccctgtctctactaaaaatactaaaatgagctgggcatggtggtgcacgcctgtaatcccagctactctggaggctgaggcatgagaattgctcaaacccagaaggtggaaattgcagtgagctgagatggtgtcactgccctccagtctgggtgacagagtgaaactgtgtctcaaaacaaaaaagaggactctgtcccccaccctcactacattgaagctgtttgctgaaaacttcatagtcattattgctgatgattttatggtcacctcttttctcctccagtgcatcccaggcagctcttagtgtggagcagtgaactgtgtgtggttccttctacttggggatcatgcagagagcttcacgtctgaagagagagctgcacatgttagccacagagccacccccaggcatcacatgttggcaagataaagaccaaatggatgacctgcgagctcgtaggtatcaaatcatgtatatgatgaaagtcatgaccctattgaagattgtgctgaaataaaacattttgtgtattcttctaaagtaaggagcagttataaggtcagagtgccctaccatctttctacccaaatttgtttacatttataaaaggtttgcttgacatttcttgcttctttgactttttattataccttatgctgatttatagccaagatttaaagcagtgaagcagtgtttagatcaaagataaccatctcaaatatctgtgaggccagatgggaaacatacatgattagaatactgcggtccaaacaaaacaaatctataggttgtatttggtcttgtggccagcattttgcaacttctgctttagattttctatatgtcctttgtttgacaccattaactttttgagtacattagcattgtggtgtgttgcatgaggacttgttaaagtcctggcagagaattattgtcctaggcctagtttctctattaggaccatagacctcattagctccatatggtagtaattcaaatgatctgattcccttttaactttttctttcttttttcttttaagaaatattaggtggagccaacacaccttatgagaaaggtgtttttaagctagaagttatcattcctgagaggttagtatgaatcagcttctcaacctacatggtgaagtgcatttataaattgggagacagagcaatgtagtagatagagcataaaggactaggttttaatcctggccttatcatgacttaaggtgacctcgaccaagttattttctctctctggagttcagtttccttctccagaacaatgggcgagatcacatcaaagaccccctcactttctaaattgtgataaaatatacataacataaagttgaccatttttaagtgtacagttcagtggtattaaatacattcacattgttatgcaaccatcaccaacatttatctccagaacttttcatcctcctacactgaaacttcatagccattaaactctaactccccatttctccccgctctcagcccctggcaaccactattgtgctttcttaacattaagctccccccggctttttcttttaacatttattttaggttccggggtacatgtgcaagtttgttatataggtaaactcatgatatcacggggatttgttgtacagattattttgtcacccaggtactaagcctagtatccagtagttttgcccttctctgtcctcccaccctccaccctcaggtaggccccagtgtctgtcgttcccctctttgtgtccatatgttctcatcatttagctcccacttataaatgagagcatgtggtatttggctttctgttcctgcaaagaccatgatctcgttctttttatggttaaggccccttttaattcaagtctcctttaaggctctcatcaggtgagttacagttgtagttttgtacagaacggggaagggaagaaatgactatctgacagttgaaacatagacatctaatcactaggtcagatcctggccaaacttgttaaagtcttgggagaacagcttaataatcatgtggtgcatcagttctaaaaatagactgggaactttgcaaggtcggtgtctcactaaagatacataataaccaaatgcaacgtatgaattgtaattgggtcctgttttgaaaaacccagcaataaaaaaaaaaaactggggagaacaactgaaatctgaacagtaaatgatattagggaattagttcttaaatttttcaaaggggtaatagtattgcatttatatgggagaatgttcttattcttagaagatatgctggagtatttagaggtaaagtggcttgaatccaggtggtagatatatggatgttttcaatactgttatttcaaactgatttattttaaattttcatagtgaaaatttaggaagagagaaagtttgcctcccaaaggcagtctccctgacatttctataataccaaaattattgtgaccaagaaactatttaaatgtatttagaagcaaaattatgtaatgaaaattatctgttgtcttattctttcataggtacccatttgaacctcctcagatccgatttctcactccaatttatcatccaaacattgattctgctggaaggatttgtctggatgttctcaaattgccaccaaaagtgagttgtgggtaaatggttgactctacagcattctgttttcttcatctattaaacttgaattagaggatcacattctaatataaaagcaactgttcatctgtttgtatatagggtgcttggagaccatccctcaacatcgcaactgtgttgacctctattcagctgctcatgtcagaacccaaccctgatgacccgctcatggctgacatagtaaatatccccattttcctctgcaacacatatcctaccttgtctataccgctaactctccctgtgtgaggatagctgcagcagctctaaccactgcaaatcatgtttttctccattaactcttttctttgatttcatctcagtcctcagaatttaaatataataagccagccttcctcaagaatgccagacagtggacagagaagcatgcaagacagaaacaaaaggtataatgtttgctactattgtcagttaattaagtatatatagtataaagtatatatgtataaataatgtttttttttttttttttttttttttttttttttgagacggagtctcgctctgtcgcccaggctggagtgcagtggcgggatctcggctcactgcaagctccgcctcccgggttcacgccattctcctgcctcagcctcccaagtagctgggactacaggcgcccgccactacgcccggctaattttttgtatttttagtagagacggggtttcaccgttttagccgggatggtctcgatctcctgacctcgtgatccgcccgcctcggcctcccaaagtgctgggattacaggcgtgagccaccgcgcccggcctaaataatgttttttagatttgccaaatttgtactgaactctagaatgactagttaatctttttctcctattgcaaccttctaaataatcattcagcaaaatagcctaatagctcaactaacagtagatgtttcataacagttgtcacctattgggcaacactagacggcaggcagcatctggttaattttttttatattgcaggtagcagggatagtggagtggtgtctcagattctttttttctaagttgtccttttaacactgagaagaatctatatttgcagggactagttgcagagatgggggaaacttttcttaggggaccattcatggaagaaagttaaaggaaaaacttcaggttgatagaatttcctcatttagcaaaattcaaattacaggaacatggaaagtagcacatcatagttcttgctgagttatgccatctttcagattgagttaaatagcagtggtgttacttgtaaaaagaaataaaaattaaaacaaaaaaattgaggaagatgtctttgagagaatatcgtatgcataatactgtatttaaatcttgcaacaaagaagtacatggaaataatattacagagcttcatttttctccatcctggcatttgtgtgaaccttactgtgtttcaccctgtctcctctttaggctgatgaggaagagatgcttgataatctaccagaggctggtgactccagagtacacaactcaacacagaaaaggaaggccagtcagctagtaggcatagaaaagaaatttcatcctgatgtttaggggacttgtcctggttcatcttagttaatgtgttctttgccaaggtgatctaagttgcctaccttgaatttttttttaaatatatttgatgacataatttttgtgtagtttatttatcttgtacatatgtattttgaaatcttttaaacctgaaaaataaatagtcatttaatgttga

SEQ ID NO: 94 - DNA, 22907 bp, Homo sapiens
ggtggcgggaagaggaggcgcgagaatggaggtggaggccgtctgtggtggcgcgggcgaggtggaggcccaggactctgaccctgcccctgccttcagcaaggcccccggcagcgccggccactacgaactgccgtggtgaggtcccaggccgtaaagaatgggcgcgtttggacgtgagggtgggcgagtggcgggccgtgctccggagaaactcgggggtcaggggctcgttttggggaatcccgagggaggaggaggccccgggtggcatcgagatgatttcaagaaggcgacggacatggatcgagagtggccggtctaaactctgcgagcggagtctcgctcactacaatgcttatgacaattagggctaccccgggtggccacctactctgacctagttggttttttcaaaagtttttgtgtatagtagtgtatgacctagtgttttcaaaaacttcaatcttttaaaaaaaatatcgattacatgttgaaaataatattttgactgttaggttcaataacatttacatttgaaatttttttaaaaaaatcaagacgggggttttgctgtgttgcccaggctgatgtccagctccttggctcaagtgatccccctgcctcagcctcctaagtagatgggactacaggcacgcaccaccatgcccagttaattttttttttttagatggagtcacactttgtcacacaggctggagtgcagtggtgtgatttctgctcactacaacctgcatctccctggttcaatcaattctgcctcagccttcctagtagctgggattacaggcatgtaccatcacaccctgctaattttgtgtttttagtagaggctgggtttcaccatgttggccaggctggtctcgaagtcctgatctcaagtgatccgtccgcctcgccttcccaaagtgctgggattacaggcatgagccactgtacccagcctaggcctacggtgtctagccagctatgctgtgtatttggcacacgtctgcagaaactggcaggtaatccttgcctggcatggtggctcacgccagtaatcccagcactttgggaggctgaggtgggcagatcacctgaggttggtagtgacccaagatcgcaccattgcactccagcctgggcaacaagagcaaaactctgtctccaaaaaaaaaaaaaagaaaagaaactggcaggtaagggatgagaaaggagcttggttgcacccatgttgtcacaccaaatgatgtcagtgctgtatgtgctgggcctcttgtgacgggcggacagggttgcagcacagtgtcacattgctccagatgacctgtgctggccgtgctccagcagcaacaggtgtttctctgctgtggcaggtttgaagcctatgctgtacaattctcatgcctttaacttttcaaatggcacttgggcatcttattacattttatttatttattatttatttttgaaacagagtctcactctgtagcccgggctggagtatagtggcatgcatgatctcagctcactgcaacttctgcctcccaggttcgagctactgtgccttagcctcccaagtagctgggattacagacgcacaccaccacatccagctaatttttgtattttaagtagagatgaggtttcaccatgttggccagactgggctcaaactcctgacctcaattgatccacccgcctcagcctcacaaagtgctaggattacaggtgtgagccactgcgcctggctgtcatcttattacatttaaaacttgcaaccatttggcatagttgtactgaatgtatgtaattttttaacaaagctctcaggataacccttaggtgctttttgtggggtagtgtgaagataaccatgtcagcatttttatgcattttcttaacagggttgaaaaatataggccagtaaagctgaatgaaattgtcgggaatgaagacaccgtgagcaggctagaggtgagtggctttttttttttttgagacagagtctcgctctgtcgcccaggctggagtgcagtggtgcgatctccgctcactgcaagctccgcctcccgggttcatgccattctcctgcctcagcctccccagtagctgggactacaggtgcccaccaccacacccagctaattttttgtatttttagtagagacggggtttcaccgtgttagccaggatggtctcaatctcctgacctcatgatcctcccgcctcggcctcccaaagtgctgggattacaggcgtgagccaccacacctggcctttttttttttttttttttttttttttgagatggagcctccctctgtcgcccaggctggagcgcattggcgtaatctggcctctctgcaagctctgcctgctgggttcacgccattctcctgcctcagcctccggagtaactgggactacaggcgcccgccaccatgcctggctaattttttttgtatttttagtagagatggggtttcaccgtgttagccaggatggtctcgatctcctgacctcgtgatctgcccacctcggcctcccaaagtgctgggattacaggcgtgaaccaccgcgcccggccttttttttttttttttttgagatggagtctcgctctgtcgcccaggctggagtgcagtggcgccatctcagctcactgcaagctccgcctcctgggtttaagcaattcttctgcctcagcctccccagtagctgggactacaggcacacgccaccacgcctggctaatttttttatttttagtagagatggggtttcaccgtgttggccaggctggtcttgaactcctgacctcgtgatccgcctgcctcggcctcccaaagtgctgggattacaggcgtgagccaccacgagcggccttgagtaggtttttaaaagatgacctaaggctgggcacagtggcttacacctgtaatcccagcaccttgggaggctaaggcgggcagattacttgaggccaggtgtttgagatcagcctgggcaatgtggtgaaaccagtctctacgaaaaaatttaagaatgagctgggtgtggtggcacatgcctgtagagtctgaggttcaaactgggcatggtgacaagtgcctgtaatcccagctactcgaggccaaggcaggaggatcccttgagcccaggagtttgacgctgcagtgagctatgatcacgccactgcactctagcctaggtgacagagtggacacccttactttgagaaacaaaaagagtttgggcttcatagtgagggcagggaggagtcaaggatttcagttagggaaaaatgttttaatagggccgggtgtggtggctcacacctgtaatcccagcactttgggaggccaaggcgagtggatcacctaaggtcaggagttcacgaccagcctggccaacatggcaaaaccccgtctctactaaaaataaaaattaggcaggcatggtggtgggcgtctgtaatcccagctactcaggaggctgaggcaggagaatcgcttgaacccgggaggcggaggttgcagtgagccgagattgtgccattgtactccagcctgggcaacaagagcaaagctccatctcaaaaaaaaaaatgttttaataggtgtgtactttaggaaagtggtcgtggttacaggatgggaaatggatttgaatgggagcatggagaccacttaatggcccattgatagcaatcagacgagataatgggcttaagaaagtggtagccgggatggagagaagggatggagagaagtaaaggacgctggagacgaaggaggaggatggtgaagccctggttattgaagtactcagggtgaggatgaggccaaaccaagatgatggcaacctcaacttcatggcatagacagtccatggtgggaaacatgggtggggcctcaggtttgtacaggagaatgaagtgttcagttttgaagatgccgaggtgagtacctgtagtcccagctactcgggaggccaaagcaggaggatcacttgagcctgggaattggaggctgcggtgagccttgatcacaccactgcactccagcctgggtgacagccagagtgcatctctaaaagaataaaaagaacttgaggtgagagttccatggggcatccagtccatgtggataaatttgtagccacgtttactacacaggctgtgtagctggggagattcagctcctaaagcttacaaattaaccaggttttgtgtttttttttttttgtttttgagacagggtcccactctttcccaggctggagtgcagtggtgcagtcacagctcactgcggcctccacttctcaggctcaaccgatcctcccattttagcctcccgagtagctgggagtacaggagcacaccaccacacctggctaattttgtttattttttgaggagacagagtctcactgtgttgcccaggctggcctcaggcctcaagtgattgtcctgccttggcctcccaaactgctaggattacaggcctgagccattgtgctcagccgagttttaacctgcttgtttgttcttttttctatcttttttatgtagtcatccagaagcaagttttaaccggttttaatgatcattttcgccgtaggtctttgcaagggaaggaaatgtgcccaacatcatcattgcggtgagtacccagccctgggcctgttgagtgtctccatgtctcatcccactgtccgctgaactgctttcttgtgcacagcgctgcctccctggagagccccttcccattcccccggcaaagggaagtgtttcactctagttgggaggcctggggttggttgctgtatttttttttatttatttatttatttttttttctgaaacggagtctcactctgtcacccaggctagagtgcagtggtgcaatctctgctcaccgcaacctctccctcccaggttcaagcgattcttgtacctcagcctcccgactagctgggattacaggtgcctgccatcacgcccagctaagttttgtatttttagtagagacggggtttcgccatgttggccagtctggtcttgaactcctgacctcaggtgatctgcccgccttggcctcccaaagtgctgggattataggtgtgagccactgtctccggccagctgtattgatctgtgtgtgctgtgggtggaatgcaggggtcagaggtgacggagatgcaaacagcagtgaacataactcaagagctacctgaggtccttctggtggtttgaagtctttactggagatctcattcccagggccctccaggaaccggcaagaccacaagcattctgtgcttggcccgggccctgctgggcccagcactcaaagatgccatgttggaactcaatgcttcaaatgacaggtaggtcttagagtcagacctgtaggggggcgggtgctctgcattgagaattgttacagaaacaacctttctcagcattgggttgtatgcgaagccttgccagctatgtgatttcctccaccccttcccagtgaaagagcgttgctcacttgtcaacttgccggtttattttttttgttttcatggaaattttcaaaaactgttcttctcagccaggcatggtggctcacacctgtaattccagcactttgggaggccgaggcaggtagatcacctgaggtcaggaattcgagaccatcctagccaacatggtgaaaccccgtctccactaaaaatacaaaacttagctgggcgtggtgctgggtgcctgtaatcccagctactcaggaggttgaggcaggaggattgcttgaacccaggagaaggaggttacagtgagctgagatcgcaccgttgagcactccagcctgggtgacgagcaaaactccatctccaaaaaaaaaaaaccaactagtttttctcttttttcaagtttaaaaatttttgtagagatgggatctcactatgttgcccaggctgatctcaaacccttagcctcaagcaatcctcctgccttggcctgctaagttgctaggactatagacacatgccaccatgccagctttttcttgtggagacgggatctcactatgttgcccagtctggtctcgaactccgggactcaagcgatcctccttgcatcagcctcccaaagtgcttggattacagacgtgagccactacactgggatgttcaaccagtaaatataatgcaaaattccaaaatgtgaaaaaaaaacccagatctgaaatatttctggtcccaagcattagggataagggatactcagcctgtatatttaaagtgtatggaaggccggccaggcatggtggttcatgcctataatcccagcactttgggaggctgaggcaggtggatcgcttgagtccaggagtttgagaccagcctaggtgacataatgaaaccccatctctgtataaaagtaaaaataaagtgttctggaggatgtgtataagttaatatgcaaatactataccatttcatataagggacttgagcaaaagtgaattttggtgtctgaggaagggcctagcaccagtccccaggaacaccaagggacagctgcatattgttcactccttgattcttcagttagggaaaatgtctggaggatattggcatctgaagattcatagtctgagattttgcttattgatcaatttcaccatcagtagcatttagaatgttgctattggtgtctctgcagttctgtactgttctgttctgttcttttctttctttctttttttttgagacagagtcttgctctgtcacccaggctggagtgcagtggcacgatctcgactcaccataacctctgccttctgggttcaagcgattctcgtgcctcagcctcccaagtagccgggactacaggcgtgcgcgggcacgcccaggtaatttttgtatttttagtaaagatggattttcgccgtgttggccaggttgatcttaaactggcctggagtggtccgcccaccttggcctcctaaagtgttgggattacaggtgtgagccaccatgcttggcctacattgcagttattttctgattcacctaataattaggaagagtcctcctctcaatttttttctctttcctgttgtgggtagagaatgaaaaattttgaattcttggctgtggttagtgaaagcttacaagataacaaaggtggtatatctgcacttctattacatcttttgaaagataatatggtatctcaagcaatgcagttaaaaaactgaaggatgaggcttttttttttttttgagacgaattatcgccaggctggggtgcagtggcgtgatcccggctcactgaacctgggaggcagagcttgcagtgagccaagagggccactgcactccagcctggatgacacagcgagaccctgtctgaagaaaaaaaaaaaaaaagtgtatattttctttgttctttgaaagacctccaagaaagaacaaatgccataaaatctcaatccttataaatagttacaattgccccccaaaaaaactcaaaaatggaaattgggcctcacagtccctgatataccgattgtttaaaagtccttgtgaaggcaactgaattggtctcagaaggtgccagtaaaaacctgtcattctttcaggggcattgacgttgtgaggaataaaattaaaatgtttgctcaacaaaaagtcactcttcccaaaggccgacataagatcatcattctggatgaagcagacaggtagagtgctttgccaaatgtattttgaccttgatctctaaatctctttttcggttttattcaatcaggataaaaagcacttttatggtagatttgcttatcatatcttccacaagcaatttaataggggcctgcaccttaaatcttatctttattaagtaacttacaaacatttgtctaagatagtcattcatttaatgtgctggtttcagcatctcttacgttaataatttaaatgagggtttttgtttttttttttttttgagatggagtttctctctgtcactcaggctggagtatagtggtgtgatctctgctcactgcaacctccgcctcccgggttcaggcggttccctggcctcagcctcccaagtatctgggactacaggcatctgccgccacacccggctaatttttgtatttgtatttgtatttgtatttgtatttatttatttattttttttttgagacagagtctcgctctgtctcccaggctggagtgcagtggtgcgatttcagctcactgcaacctccgcctcctgggttcacgtgattctcctgcctcagcctcccgagtagctgagactacaggcatgcaccaccacgcccagctgattttttgtatttttagtagagaaggggtttcaccatgttagccagggtggtctcaatctcctgacctcgtgatccgcccgcctcagcctcccaaagtgctgggattacaggcatgagccaccgagcctggcctaatttttgtatttttagtagagatggggtttcgccatgttggccaggctggtctcgaactcctgacttcaggtgatctacccgcctcggcctcccaaaatgctgggattataggtgtgagccactgtgcctggcctgtaaatttttttattgtggttaaatggacataattaaccataaatttttttttttttttttttgtgagacggagtcttgctctgtcgcccaggctggagtgcagtggcgcaatcttggctcactgcaagctccaccttctgggttcacgccattcttctgcctcagcctctcgagtagctgggactacaggcgccctccaccacgcccagctaatttttttgtatttttagtagagacggggtttcactgtgttagccaggatggtcttgatctcctggcctcatgatccgcccgcctcggcctcccaaagtgctgggattataggtgtgagccactgcgcccggcccaaaatttaccattttaactattttgaagtatacagttcagtggcatttagtacatttgcaatgttgtgcaaccatcacaacacttcggttggtataaatgaagaatctgagtccaggctcggtggctcatgcctgtaatcccagcactttgggaggccgaggcaggcggatcacctgaggtcgggagatggagaccaacatggagaaacttcgtctctactaaaaatacaaaattagccaggtgtggtggcacatacctgtaatcccagctacttgggaggctgaggcaggagaattgcttgaaccccggaggcgaaggttgtggtgagctgagatcatgccatttgcactgcaacctgggcaacaagagcgaaactccatctcaaaaaaaaaaaaaaaattgaaatgacattaagaaaagaatatagaaccctaaccctataacgttgttttttgttgtagtttttgagacagggtctcactatatcactcagactagagtccaatggcacagtcatagctcactgcaaccttgaactcctcggctgtaatgatcctccacctcagcctcccaagtagcggagactacaggcttgtgcaactgcaaccagctattttttttttcacaggggcaggatctcactatgttacccaggctggtctcaaactcctggcctcaagtgatctgtctgcctcggcctcccaaagtgctaggattgcaggcatgaggtgctgtgcctggcgaaataaattttttttagggccaggtgcggtggctcacacctgtaatcccagcactttgggaggccgaggcgggcagattgcttgaggtcaggagttcgaaaccagcctggccaacgtggaaaccccgtctctactaaaagtataaaaattagccggacatggtggcgcccaggctggaatgcaatggtgcttgtaatcccaggtactaaggagtccaaggcaggagaatcgcttgtacccgggagacagaggttgcagtgaactgagatggtgccagtgcacaccagcctgggcaacagagcaagactctgtttcaaaaaaaaaattttttttttttaatgtggcagtaattcatgttctttgaagaaaatttagaatatattaatagtttgctgcctttttatttatttatttttttgaggtggagcctcactctgttgcccaggctggagtgcagtggcatgatcttggctcactgcaacctctgcctcctggattcaagtgattctcctgcctcagcctcacgagtagctgggactacagacgtgcgccaccacgcccagacaattttttttttttttttttttttgtatttttagtagagttgacgttttgctgtgttggccaggctggtcttgaactcctgacctcaagagagccacctgcctcggcctcccaatgtgctgggattacaggcatgagccactatgcctggccattaataacttgctttttttcttctctttttatatactatcaatgtttacacagttgagatcataatatatataatttttgtatcctggtttttccttttaatgttgtaggcattgctctacattatgataatctggtaaacaggcttttttgtattttttaaaattttttgtagaaatagaggtcttactttgttgcccaggctggtctcgaactcctggtctcaagcggtcctcccgcatcagccttttgagatgggaggattgcttgagcccaggagttcgaggctgcagtgagctatgattccaccattgcactgcagcctgggtgacagcaagaacctgtctctttaagaaaaaaaaaagaataaaaaaggaagaaagaaaagttggcagctggtgtcatgattgttctcctgaatttgtgtcatgaaggactggagagaaccaattcccacaagtgtgatggcagcccttgtagatcgtggttttcgtgagtttcacttgagggttgttctgatgctgtaggtactaaatgctgtttgcacagtctttgagagagcggcctgcaggtgttagcattagagggatggcctgcgtacttccaatgagaccctcatttaggacattggatgtgtcttatgtcctgggtttttgtatagggaacgatttgtgtcacatggtctctgggtcccacttgcaaacttgtgtttttcttctcagcatgaccgacggagcccagcaagccttgaggagaaccatggaaatctactctaaaaccactcgcttcgcccttgcttgtaatgcttcggataagatcatcggtgagtgggagctttcggtggctgggggccacgtggtgctcaactgggcttttttcttttttatagatgtggtctccctcttcgctcaggctggagtgcagtggtgccatcacagctcactgcagcctcaaactcctgtgctcaagtggtcttcctgcctcagcctcccagtagctgagactacaggcctgtgccaccacacctggattttttttttttttttgagacaaagtctcactctgtcgcctaggctggagtgcaatggcacgatctcagatcactgcaacctccacctccaaggttcaagcaattcttgtgcttcagcctcctgcgtagctgggattacaggctcgcacaaccacacccagctaattttttttttttttttttttttttaagagatggggtttcaccatgttggccaggctggtctcaaacgtctgacctcgtgatcgcctgcctcggcctcccaaagtgctggaattacagatgtgagccactgcacctggcctcgccttggctctttagcgctggaagagtagggatttttttattgtgtagcatgggccaagcactatataatcaagtttttaaatttatatttttttaattgacaaggagaaattgtatatattatgcacatgtttcccattgtaatcaacttttaaatttaatcttacataatcctatgaggaggtattattcgcttcagtttagagatgagaaaactggagcttatcctgatgtttaggatctaaggaaaaaagagaaagaaaacgagcttggagaggttgagtagtttccccaaagtcagagcaagtgcaagagcagctgggattggagccccagttctatcaccctcttgcactcttggaggcacaaggatgttgttgatgtcccctgcacggtgtcacgatcacagtcgctctccagataccttcttgtgctattcatgtgctctgagtacttggtataggcagtatctgtacattggaatttgttgcctccgggaagctcctctctcaaatcctgcagtccgtcttttctctaaccttactgtttgcccttccacctccctccctgcagcctgtctgcttctgcatgggtttgtcccgccccaggtcccaagagtgctctagtctgtcaacttcctgctggtttcacatccttctctttcttttttttgtagagagagtctcgctctgtcgcccaggctggagtgcagtgttgcgatttcagctcactgctatctccgctgcctggattcaagtgattttcctacctcagcctcctcagtagctgggattacaggcatgtgccaccatgccaggctaatttttgtatttttcttagagacgaggtttcaccatgttgcccaggctggtctagaacgcctggcctcaagtggtctgcccacctcggcctcgcaaagtgctgggattataggcgtgagccaccacggctggcccatccttctctttctgacacaggctgcctgcacagcccagctgtcctctttcctcatttttcattgctctctcagccgctttctttgcctcacttctgccctgctgaaccccaaccatatgagctcatccatctgacaacccccttgccacccaggccgctgttgccgacgagcgcattaccaaatatggcacccacaaagtcatggctaccagccctggtggggctctcagcagtgtcaagaatcctttgcattcttttcccttcccaaaatcgcactgatttgtgcattgattcattaacccattcaccgaacgcttaactctggttcttagtagccgccaggcaccatgctagtggagagctcgtggagtttaatgagaagtattctccactttgcagatgccagcaatgaaatggagaaaaatgcattcctaggtcttgatttggcagggcacagtggctcatgcctgtaatcccagcactttgggaggccgaggcaggtggatcccctaaggtctggagttcgagaccaacctggccaacatggtgaaaccccatttctactaaaaatacaaaaattagccgggtgtgatagcgtgcgcctgtaatcccagctactcaggaggctgagacaggagaatcacttgaacctgggaggtggaggttgcagtgagcctagatcacaccactgcactccagcctgggcaacagagagacttggtctcagtaaaaaaaagaaagaaagaaactggccaggcatggtggctcacacctgtaatccctgcactttgggaggctgaggcaggaagactacttgaggccaggagttcgagagcagcctgggcaacagcaaaaccctgtctatgaaaaaaaaagaaagaaactgggttggcccattcagattgaattgtcatgtgcccagaagggccaacatccagcacacaccaattccagagtccacctgggccagggctgactcatctaacagcttgtggcaggcacatggatgtgtttctactggaggatcatttccccgtctggaagccgtggctagccaaggccatgtgggcagtgccaactgaggcctctgtcattgcttattggttgacaccttgacatatcaccctgtgtttaccaagtctctctctctctcttttttttttttttttttttggagacacagcctcgctctgttgtccaggctggagtgcagtagtgtgatcttggctcacttcagcctccaactctcgtgctcaagcgagtctcttgccttagcctcctgagtagctaggattacagacgtgcgacaccacacccagctaatttttgtatttttagtagagatggggtttcaccatgttgtccaggctggtctcaaactcctgtcctcaagtgatcctcccgcctcagcctcccaaagtgctgggattcaggcgtgagccctcgtgtccggcctaccaagtctctattgagtgcctggggctgtgtggattgtgcagctgcagccttatgaccaaagagctagcaggatgatgccggcctctgcagggaagcctcactactgtcccgtctctgttcagagcccattcagtcccgctgtgcagtcctccggtacacaaagctgaccgacgcccagatcctcaccaggctgatgaatgttatcgagaaggagagggtaccctacactgatgacggcctagaagccatcatcttcacggcccagggagacatgaggcaggtatgtgggctgctaccattcaggcgtgggcatcctgtgcctgccatgccccttccatggggaaggggagggaagtgacagctgcacaaggtacaacaagagaaagagacagagacctggcaccctcctgggacagtgggctgtctagctcggactccaagaagagaggcagggaagggcagagctttaaaagtcaccccggaggctgaggcaggaggatcacctgaggtcaggagttcaagaccagcctggccaacatggtgaaatcccatctctactaaaaaaaattaaaaaattagccaggcatggccaggcacagtggctcacgcctataatcccaacactttggaaggccaaggcgggtggatcacgaggtcaggagttcatgaccagcctggttaacatggtgaaacctcatctctactaaaaatacaaaaaattagccaggcgtggtggtgggcgcctgtagtctcagctactcgtgaggctgaggcaagagaatggcattaacctgggaggcggaccttgcagtgagctgagatagcaccactgcactccagcctgggcgacagagcgagactctgtctcaaaaaaaaaagctgggcatggtggtgggtgcctgtaatcccagctactcaggaggccgaggcagaagaatcgcttgaacctgggatacggagattgcagtgactcgagattgtgccactacactccatgctgggtgacagagtgagactctgtctcaaaaaaaaaaaaaaaaaaaaaaagtcacccttggcccggtgcggtggctcatgcctgtaatcccagcacttgggaggcggaggtgggagaatcgcttaagcccaggagttcgagaccagcctgggcaacatagcgagactcctgtctctactcaaaaagaaataaatataaaaatcatccttgacatgtgtttgctcctgaacaggcgctgaacaacctgcagtccaccttctcaggatttggcttcattaacagtgagaacgtgttcaaggtacaagcgctagtgtgggtggtactgtcagcagaagccgtgcttccctgtgggggccagtggggctgaagggctgggctggcagtggggacggacatctagctgctcttgtgggtgccagggagcccaccctgctcccgtctgtcctctccctattgctgctttgctgcacaagctggagagtttcgggggacctggaacgtcacttgtgtgtggtaggtgagggaggaccacggatgcatcagacccagggtcgagcaatttctgacgtgtcttatttgatcccagcgacttccctgcacagaggttctcaccatcacattgtgggtgatgacgtgggcccaggggatcccctggcccctaaagggcaggcaggagcactgtgctgttccccagtagccttcagaccccacaccctgggttttttctgcaatgctgtgccctgctccccacttctgcccctggagggtgggtagtaaccctcaaagccaggctgaggaaaaggtttctcacttactctcccatgtcagcaaaacatttttctcttgggaattcttttgaaaactgcttccgcatcctgataactccgcgtctaaatgccatttgagagattcacttcccccttatttgggggaagaaactgggaagggctgtccaagctttcagcctatagctgtttcttaccaggtttgtggacaacagacaagcgatttttgaagcatctgggtagatctgggcagtgaatgcattttcgaggccacttaggaaggggaggcccgctcagaaacaggggtgatggttcgggccctgttttgtcttggagggtcactgagggctcaggaaaccatggcttccaccgggaaaaggcaagggcaggtgtgggtgacctctggagccatcaggaggctttcattgggaagatgtaggggtcgacattgtaccagaggcagagcctcatgccactgcggagaatgctgcagggaggacggagtccccagcaccatgcacctgcctgctggagtagcctgaccccttgtttagggtgtcaggctgaggctgggggaccttttgtagggaaggccagttcctactccggggtggaggtgggaattggcccaaaagacctcccagttctaaagtgaattccaagtggttctgggcaactgaccccccaagtgatctaagacagatgacttgtgactttaaagctgtccccaagtgagcatccttcacaggcccttggttgctctcttgttcatctgtcttatgtttgggaaatttatcttcctggtgccggaagcacttctctttgatggtgagaggagcattccccaaactcatcctggttgctggagaatttgatgaaaacaacaggttgagaagttttacccatagattgcctggaagtcggtctgttggggcctccccgctcacattgtcccttctagcccctgaccgcctttcctttccctttggccaggtctgtgacgagccccacccactgctggtaaaggagatgatccagcactgtgtgaatgccaacattgacgaagcctacaaggttggcctccttccccccgtcctggcagaggaaccgctcacttcttgggcagaggagagcgggagcccttctggtaccagggacattatacacatcactccattcattcttgaaatcttacttgggagactgaggcaggaggatttgttgagccttggaggtcaaggctgcagtgagctgtgattgcgccactgtaccccagcctgggtgatggtgagaccctgtctcaggaaaaaaaaaaaattattaatatcatgctatgtgttaatctgtctaggaactggaaaaaaaaaattatgctaggagttgggtgcactttactgatgagaaaactgattcagaggctgaattccttgtcctaaatcactgtgtttgtttatttatttatttatttatttatgtagaaacagggtcttactctgttgcccaggccggaatgcactggcgcggtcacagctcactgtagcctctacctctcaggctcaggcgatcctcccacctcagcctcccaagtagctgggactacaggcacatgtcactatgcccagccctaagtcatggtttaaaagcagtagaactagaattcaaaatggtgtttttctcctgtaattatatcctctgcaggagaaatttgtcagccaaagtcaggaggaaagaccagcctagctccttctccagggaagccatcttctctccagttaaggggaagtgtccccatccattctcataggcacaggcattctgggatccagcagcccccagctagccaggagaggagggagcaggaagattctagcctcacaatgggactgagtgctgtgagcagattccagcagatgtggctggggttcaggcgacctcaagccacatgggtgtggtgtggttggtgtggttcaaggtcattgatccagtcatggtttccctctgcctaccccctaacaaactaggttggaagttgactgggtttagggcatagttccacccaatgtgaaaccggagtgcaaggcggggagactgagcagagacccaggcccagggtccctgagtagacctgaagaaagccttcagatttgtgggcacagagcttctctgcctcctgaattcaccccaagatgccaaaacaaaggcaaaaaggcctgcctccagacgctgcagcctgggtggggcagggtgggtgggaagcaggaggctgggattacccagtcagggtgtgctccaggctcgtcctgcagaggttgcattgggactgcagctggatgaagctagcagatgaatggtctgctttttccactttgctatacctagtcatcagattaataaagcattttaagagctccggatcaagagattacatgggtgtggtagtagaccattttgcaacacagcttaacacatttgcgataggctgggctcagtggctcatgcctgtaatcccagcacttttggaggtcgaggcaggaggattgcttgaggccgggaacttgggaccagcctgggcaatatagcaagactcttatctttatattactgaaaaaaaaatatttaagcaaaacaacaatacatttgcaatgttatctctctatctgccatgaaaatcagttaaggtacccccatgtgacctgaagggtgggccccaccagctgtggtgagtctcaaaatcacatgtcttcttacagtttaaagtggtaagcagccttttctgtctcctttgtctagattcttgctcacttgtggcatctgggctactcaccagaagatatcattggcaacatctttcgagtgtgtaaaactttccaaatggcagaatacctgaaactggagtttatcaaggtcggtgagaatgtagaaatgcctctgtcctcaagaatgtggcccatagtggccgggtgctgtgggccacacctgtaatcccagcactttgggaggccgaggtgggcagatcacctgaggtcaggagttcgagaccagcctggccaacgtagtgaaagcctctgtctactaaaaatacaaaaattagctgggcatggctgggcgtggtggctcatgcctgtaatcccagcactttgggaggccgaggtgggcggatcacctgaggtcaggagtttgagaccagcctggccaacatggcaaagccccatctctactaaaaatacaaaacttagctgggtgtggtggcaagcgcctataatcccagctacttgggaggctgagggaggaggatcgcttgaacctgggaggtggaggttgcagtgagccaagatcgcaccactgcactccagcctgggcagcagagcgagactgtctcaaaacaaaaaaaaaagactgtgggccctggcttcgctttctctgctcacaggcctggcatctagaaggtgctcagtgtttcccaactgcagtgggagggaggctgtgtcttagttcctttgagttactataaaggaataccagagactgggtaatgtagaaagaaaagaggttgatttggctcacagttctgcaggctgtacatgtagcatgatgccagcatctgcttctagggaggggttcaggctgcttctgctcatgttggaaggggaagtgggagcctgtgcatgcagagaccacctgttgagaacggagggaggtgccaggctcatttgaacagccagctctccagggacctaattgatccagaactcactcactaccttggggtgggcaccaagccattcacgtgggatcttcctcatgacccaaacatccccacattggggaccaaattccaaatgagattggaaggggacagacgtccaaactagatcaacgtggctgattgtcctgaggaccaagtttgtttcacacagttctgattttcttcattcaaggctctcttgtgtattgactgattgattgatttttcaaggttagattaattgaggtttaatttacatagagtaaaattcagcctgttaggtacaggacaaacgcactcagtcatgcaaacactatcaccatcaggatgcagaatctgtcatcccagaacaactcatgtgtccctttgaagccagccccctccccgactaccacttggaaactaccgatgtagtttctgtttcatgggatacagttttccagaatatcatataaatgggatcatgtagaacttagccttgtgagtttggcttctttctttcactgtagcagaaatgcctttcagatgtgtccacgctggtacttctatccatgagtcagtccgtgttatcactgagaagtaatccatcctgtgcgtgtaccacagtttgcttatctgtccatcagctggaggacatttgggtttacagattgtggtgactgtgaataaagccagtgtaaacatttgcatatatggattagtgtgaatgcaaatgttaagtttttctttttcccaagtaagttcccaggggtgaaattgcctgggaaaatgataagtgtatgttttactcgataaggaactgccaaacggttttccgaagtggctgcagcacgtgcattcccaccagcattccggaggatcctcaacctagccaccacatggagtgctcagtttggtttttaagccattctaataggtgtgtaatgaccggatgcagtggcttacacctgtaatcccagctactcgggcggctgagggaggaggatcgcttgaacccaggaggtggaggttgcagtgagctgagatcacacccctgcactacagcttgggcgacaagagtgagactccatcttaaaaaaaaaaaaaaaaaaaaaaccaataacaacaacaacaaaataacctaataggcatgtgatgagatctcattgtgcctttaatttgcatttccctaattactatgctgaacatttaatcatgtgctcgtttgccatccagaatcttctttgatgaaacatctgttcatatatacccattttttaaaatttttacattttttattttaattgtactgtattttttgtttagagatcatgttaagaccggccaatttttatatttttggtggagacggggtgtccccgtgttgccaaggctggtcttgaactcccgggctcaagtgatcctcccgcctcggcctcccaaagtgctagaattacaggtgtgagccactgcgcctggcctaccttttttatgtttttgagagacagggtcttgctctgtcacccaggctggagtgcagtggtgcgatcatagttcactgcagcctcaaccttccatgctcaagcaatcctcccacctcaggctcccgagtagctgggactgcaggcatgtgccactacacttgggtcatttttattttctttttttcgtagagtttgggtgttgctatgttgcccaggcccaactctgggcaagtgatcctcctgcctcagcctcccagaatgctgggattacaggtgtgagctactgctccaggtctaaatctacccattttttaattgggttgtttgatttttattactgaatttatttacttatttatttttgagatggagtcttgctctgttgcccaggctggagtgcagtggcactatctcagctcactgcaaccttcgcctcccaggtttaagtgattctcctgcctcagcctcccgagtagctgggattacaggcgtgcgccaccatacctggctaatttttgtatttttagtagagatggggttttaccatgttggtcaggctgatctcgaactcctgggctcgtgatccacctgccttgacctcccaaagtactgggattacaggcatgagccaccacgcctggactttattactgaatttttgagaattctttatacagtctggatgcaagttctttatcagatatataaatattttcctctagcctggctttccgtgccaccaccccgccccccctcgccccacccattttcttaacagtttctttgaaagaactatcagcatccttttaagaaataaatagaactttaggtaaacataatccattgcatcttagcattcattttccggctggggttggaattcctcatgctgattttgaaaaaaccattagttcagtttgtttctgtttttatttttatttttttcagttcagattttaaaaaagaactcccccacttattaaccagatttgaatttggtttgtttttcaggaaattggatacactcacatgaaaatagcggaaggagtgaactctcttttgcagatggcaggcctcctggcaaggctgtgtcagaagacaatggccccggtggccagttagagcagagacttcactgactgacttacaggtgccctattctgaggtacaggagccgcggctttctgatgggggaaaatgccgccttaggctggagccaacatgactgtcctttaaactccagtggctggccaggcacggtagctcacgcctgtaatcccaacactttgggaggccgaggcaggtggatcacctgaggtcagaagttcaagaccagcctggccaacatggggaaaccctgtctttactaaaaatataaaaattagctgggtgtggtggcgggcacctgtaatcccagctactcgggaggctgtggcaggagaatcgcttgaacccaggaggtggaggttgcagtgagccaagatcacaccattgcactccagcctgggcgacagagtctccatctggggaaaaaaattaaataaataaactcccgtgacttgcatgtttgcttctgggacgtctgtgccccgcaagtgtttgagtttggcctccaccccattgatgcggtgacggggcggaaaggcgcagagaagctgagggcggtctctgatctgtgtgtgggttgacattttagctaataaagccttgcagtgtttgttggcaa

SEQ ID NO: 95 - DNA, 20783 bp, Homo sapiens
ccgccggccgtgctgttcccgccaattcctgtggtaatccttaccgtggcgagttccgcgctcaatggagacgtttgaccccaccgagctgcccgagctgcttaaactttattaccggaggctctttccctactctcagtactatcgctggctcaactacggtggaggtgatggaggcgaggaatgggttcgggagcggagtgtgaggaggttggaggcggggtgtccttagaatgacaatatgaagcgccttctgtgcaccaggctttgtgccgcgcgccttcatttgctctctcgagcccgccccaccacttcataggtgtaaatgggccgagagaggatataataagccagcctgcggccacgctgtaaaaaaaaaaaaaaaaaaaaaaaaaacagagccgccgctcctacctctgcgtggtcaggctcacattaggtgccccgtttacctgcagcggtgcccagggggttactggggcgtagcgtgaagctgctgaggcatggtttgcatcaggagcggaagagcctctctcagaggaagagaaatactttcttccttgcagctgaatttattagtgcgaatcgaggagagaggggtggcattacatatttaaaatatttatgcatctgtttcatcttttgtaccgttccctagcaaatacggaatggtaactgctttcaaattagggactaggtcatgtggattttgttttgtttttcttttacatctaccacggtgttgagcatagggggctcattaaaaacatcttctcgggccgagtgccgtggcttacgcctataatcccagcactttggaaagccgaggaggacggattacctgaggtcaggaattcgagaccagcctggccaacatggtgaaaccccgtttctacaaaaaatacaaaaattatctgggcatggtgggtcgcatgcctgtagtcccagctacagcctcgggaggctgaggtggtaggatcccttgaacccgggaggcggaggttgcagtgagcctttatcgagccactgcactccagtctgggcgacagagcaggaagcaagcaagattccctcaccgaaaaaaaaaacttctcattggctaaaattataatgccctgagccaaataaagtagcaaattaactttaaaatgtacatttattttgcagtgataaagaattactttcaacaccgtgaattttcattcacattgaaagatgatatttacattcgctaccaatccttcaacaaccagagtgatctggaaaaggagatgcagaaaatgaatccatacaagattgatataggcgcagtatattctcacagagtaagaaatctttttttaatatattttgttgttttattttgtaaaccaagaatgggttgattcctcttgcgttttgagattaaatttttagagtttattctagatgaaaagccactttttaattgtttggcaagtgattaatccttttttgttctttgacgttctgcattactgatgaaatcatttgggagtgaattggttgcatttttactaggacaaaaaaaattgagtatctagctactaggaagaggaagtcgacatgatttaggaaagggaaataattagccgggcgtggtggtacgcgcctgtaatcccagctactgaggaggctgaggcaggagaatcgcttgaacccgggaggtggaggttgcagtgagccaagatcgcgccattgcactccagtctgggcgacagagcgagacttggcctcaaaaaaaaaaaaaaagagggaaataaaagagaattacattctcttccaccatggaagttattctttttttcttttaattgtttatttttattgaggtcaaatatacatataaaacttattatctttaccacgtttaagtgtacagttcagtcataataaacatttatattctttttccttcatacccctggagttattcttgattcctctctttctcacattcccatacccattctattaggaaatccctttggctctaccataagtgtatctaaaatccagccactactaccagtgctaccaacattatcatctcatctgaattactgtaaaaacctcctaacagtttgcctttgtagaatctagagtccattgtcaatacagaagctagagtaatccttttaaaacaactcagaatctgtgattcctctgctgaaaacattctctggtggctgctcatttcactgactaaaagtccttctctccccctcattcattcctgccacactgacccttgctcaagctgtttccactgcctaaaacccatttctatacttggttcatcccctcacctccttcaaatctttgctcaaatagcaccttctcagtgaggtctactaaaacctgccactcctcccaccccctgccactggtatattctaagtaccctagaagagtgcctggcaagagacagtacactataaatatttgttgagtgaatgaacaaaccaaaattgcccttcttccccttctcaaatatatacactggtgggtggagggaatacatacatagcataatagcttttatgtggagtttttcatgttatataacttgttacttgtatcaatcctcattctttttacaaaggaggaaacaggcccagagaacttgaatagtttgcacaagctcacacacaatttctaaatgatagagctggcacttaaacccagggtttctgactctaaatcccagacccgtctctcatcatcaaagtaaggggagaagaggtaataaaaggcaggcagaaaaaaatactttggagttgttttacttcccctttataggttgagaataaaactgaaaatgaacttctaagaagggttagggtgccactctctacttccttctccttaatttctaaagggagaaaacgtctcatttttttcttgggccaagacagaagcatctatagacctttatttactttttgtgttttgttttgtgatttttgtcagttatgtatgcacatggtttacaaaatcaagtacttctattcggcttttaaaaaatctgctaccaggctgggccggtggttcacacctgtaactctagcactttgagaggctgaggcgagcagataacttgaggtcaggagttcaagaccagcctggccaacatggtaaaactctgtctctaccaaaaaatacaaaaacagccgggcacggtggcacatgcctacagtcccagctactcaggaggctgaggcaggagaattgcttgaacccggtaggtggaggttgcagtgggtcaagatcacgccactgcactccagcctgggcgacagagtgagaccctgtctaaaaaaaattctgctacccttccccctcattttttgctacccagaagcaactactttctttctttcttttgttgagacaagtctagctctcttgcccaggctggagtgcagtggctagtctcagctcactgcaatttctgcctcccggtttcaagtgattctcccacctcagcttcccgggtagctgggattataggcgcataccaccacacttgtctaatttttgtgttttttagtagagacggggttttgccatgttggccaggctggtcacgaactcctgacctcaagtgatccacccgccttggcctcccaaaatgctgggattacaagcatgagctaccacacccagacccagaagcaaccactttcttttagctaaagcttttttttttttttttgagacagagtctcgctctgtcatccaggctggagtgcagtggcatgatctcggctcactgcagcctccgcctcccgggttcaagcgattctcctgcctcaccctcccgagtagctgggattacaggtgtgtgccaccacgcctggctaattttttgtatttttagtagagacggggtttcaccatgttagccaggttggtctcgatctcctgacctcgtgatctgcccgcctcagcctcccaaagtgctgagattacagtcgtgagccactgcgcccagccctgttcagattatttagagagaaatcttctagcttcctgcctgagttggtagtggaagagtacagaagtgggtggaaagggctgggtcttaacattccacatataaatgtctaattattcccctaatatcaatttgtaatatcaatacaacacactcttcaattgtacttgttgtccaagtccagggaccttctgttttatgctctctggaaaataattcaggtgtcttctgccagggaaatgaaagagcagtcacctagctctgcaagctaagtgtacgaatctgggtagctaactgcttcttaactatgctttgaaccaatcctccttttttttttccttcagtcaagggtggccttgaaaaatcttcctgtttttcatctcagcttcactaaacacgcacttactcattccaacaatacctggtatcacctatccctgagccttttgggggttctgaggtataaattgggttgcgcctcttatctttccttactgacagcctaagatttagttttatgaatctcctcagtaatcactcccttctgacttacagttataaaaacttatggtggaattaacctctcaggttcttttttttgagacagagtctcgctctgtcacccaggctggagtgcagtggcgtgatcttgactcacagcaacttccacctcccgggttcaatgatactcctgcttcagcttcccaagtagctgggactacaggcatatgccatcacacccggctattttttgtatctttagtagggagacagtttcaccatattggccaggctggtttcaaactcctgacctcaagtgatctgcccgcctcagcctctcaaagtgctgggattacaggcatgagccactgtgcccagcttctcatagcctctttataataaagtctcaattcaaactaattggggagatctttttgaattattgaaaaatttttaaatacttctatgtatggtaacaagtaaaggttcttaaaacaccttgcaataggccattatttgtatacgttcccttgtcagaaaactaaaaacagctttattattatccttattgaccaacaaacatttatgatggatatgtattcattaaaccctgctttaagttggtgaaagttaagactctcatcaatagtgtatgtgtaagatccaaaataatgaactttcactgtcataaagttggcattatatagtctctttatttctgtttggcaactttttccatatgtgtagaaaataagcagatttagcagtgtggcagctcttatagaaactgatcaatattttgtatctgtagcccaatcaacacaatacagtgaagctgggagctttccaggctcaggaaaaagaactggtatttgacattgacatgacagactatgacgatgtgaggagatgttgtaggtgagcactgtgtgtcttgctgttagggtgggtggtatcactgacaatgagtaatgatgactctgctttagttctgcagacatatgtcctaagtgctggaccctcatgacaatggccatacgcatcattgacagagcattgaagggcaagtatcagcagtttctgaatggggtcaagtgtaagaatcggttttcctctgactactattaactattagtctctgtattttgtgatcaaatctcattaatttgtgtgtgtgtgtgtgtgtgtgtgtgtgtgtgtgtgtgtgtgtgtgtgtgacgagtctcactctgtcagccaggctggagtgcagtggtacaatgtcggctcactgcaacctctgcctcctgggttcaagtgattctcctgcctcagcctcctgagtagctgggactacaggcgcacgccaccacgcccagttaatttttgtatttttagtagaggcagcgtttcaccatgttggtcaggctggtctcgaactcctgacctcgtgatctgcccacctcggcctcccagagtgctgggattacaggcgtgagctaccacacctggcctaataaaatagttttttaaaaaagaaagaaattcccagcagagagaccaggatgggtaaagagatgaagcaagaacatggggagcacaggaaacaacaagtaatttaatatacattaattaaggagtttatagatttgttttaaaacctattatttctctcttcctcagaggactttggatttaagcatcgtctctgggtatattctggaaggagaggtgttcattgttgggtctgtgatgaatcagttagaaaactgtcttctgcagtacgttctgggatagttgagtatttgagccttgtaaaggtaagatcctcttaattctaatttgcattgctttagtttctagatgttaccaagcctgatatgtttactgtcaaagaaaatgaaactatcttttttttttttttttgagatggactctcactctgttgcccaggctggactgcaatggcatgatcttggctcactgcaagctctgcttcctgggtccaagcaattctcctgcctcagcctcccgagtagctgggactacaggctcctgccactgtgcccagctaaattttgtatttttagtaaagactgggtttcgccatgttggccaggctggcctagaactcctagcctcaggtgattcacccacctcagcctcccaaagtgctgggattacagacatgagccaccacactggcctaaaacttatctttaatggcattcacattgcagagtaaatgatcttaccaatagatcatttaaagtcatagtagctacatgttttaagatatttcattttattttgctataaatatcttgctttgtggcatatgtaaaataatagataaaatagatttattatatataaaataatagaacatgttaaagtttggttttggttttggtttgtttttttggttttttttgttttgttttgttttgttttgagacacggtctcaccctgtcacccaggctggagtacggtaacgtgaccacagctcactgcagccttgacctcctggtctcaagtgacccttctacctcagcctcctgagtagctgggactaaaggcatgcgccaccacgcccagccaattttttaatttttgcagaaacaaggtctcactatattgcccagggtgttcttgaactcctaaactcaaactatcctcccacttcaggctcccaaaatgctgagattacaggtgtgagccactacatccagcctacaaatttttttttttttttttgagacggagtcttgctctgttacccaggctggagtgcagtggcgctatcttggctcaccacaacctccgcgtcccgggttcaagcaattctcctgtctcagcctcccaagtagctgggattacaggcacttgccaccacacccggctaatttttgtatttagccaggcgtgttggcaggtggaaacagggtttcatcatattggtcaggctggtctcgaactcctgacctcaggtgatccgcccgcctcagcctctcaaagtgctgggattacaagtgtgagccactgcgtccagccctagaaatgttttaattataattatgcatcacttaacaataaggatacatcctgagaaatacatcactttgcaaaagtcatggagtatacttacacagacccagatggtatagcctactatacatctaggctatatggtataacctattgctcctaggctacaacctgtacagcatgttactgtactcaatactgtaggcaattgtaacacaatgataggtactgatgtagctaaacatacctaaacatagaaaagtcacagtaaaaatacagtattgcaatcttatgggacccaccatctttttcttttttttttgagatggagtctcgctcttgtcaccctggctagagtgcaatgatgcgatctcggctcactgcaacctctgcctcccgagttcaagcgactctcctgcctcagcctcccgagtagctaggattacaggcatgcgccaccatgcccagctaattttttgtatttttaatagagatgggattcaggctggtcttgaactcttgacctcaggtgatccacccacctcagcctcccaaaatgctgggattacaggtgtgagccaccgtgcccaccatcttatatgcagtccatcatgactaaaatgtcgttatgctgcacatgactgtatttatattgtatacctgaagttcttttttaatgatttatttttcagggtggtcaagacgttaaaaagaaagttcacctaagtgaaaaaattcacccttttatcaggtctgttggaaaagtctccaagcactttaaggtgtctgatttaccggcatgtgcctttagagttaccttgctatcaattttcactgctgggtagcattttataataataatagctatggttaattgagtgcctattttatgctgcagtattcctaaaaggtgctttacagatgttctcattgctcttcaaaaaaaccccacaagagacttgatggtatctccatttatagataaggaaaatgagttttagagagattttataatgagcttggcatcacacgacaagttagttgttaaatttaggattcatgccctggtctgcctgactgtaaagcctactccaatgctttttccactgaattcactacttctctaggatagtggaaaaagccttatattaggagtaaaaattcctattctgccacttactatgatcttgataaaatattgacaaaatattgctgcctccatttccttatctctatgatggggagaacagcatgcactctacctgtctcacagttgtatcaatgattaagtgaaagagtaaatgtgatgcatatttgtaaactgcaaacattatatgattgttgagatattaatacaagcaattcacagtggaaagtgtaggctgcatcccacattctactactgatgtattatggtgtcctgggttggttactttctacccttattgcgtatattaaccttctaagttgtgaggtttaaaaagtaaacatttcttgtatacccattctgtgccaggttctatgtcaggttcttttcccttaaaagtgtctcatttaattatcataaccctgcacagggtagtattcccattttacctagttaagttctgaaaatgtcatgaaaataagcagtagttttccccacaatggcagcaatacctatgtggcatatgtgttactgatagtgttgggactctgttgttattgttgttcttacagaaaatctataaacataataaaaaaatactttgaagaatatgccttggttaatcaagatattctcgaaaataaagaaagctgggataagattttagcccttgttcctgaaaatatcctttcccgtgatcatttctgtgtgagctagttgttttgatctgtgatattataaatgttagacatgtctgcttgtaagttctcatatacttataagtttaatcttttttacacaaaatatctcctgtatttctggattttagtatctctggtctggaacataataaaaaatggggccatgttgcaaatcagttttctcattttggaagttggtcctagaattaacagctaaagaatggtgaattacatagtcaaaatacatgcagaccagggaaaactttacatcataccttatagttattttggcattctttctgttatatcatcactgtatttttacaggggaagatttcaatgatacaactggtgttggtttggtttggggtttttttgttgttgttgttgtttttaagacggagtcttatactgtgttgcccaggctggagtgtgcagtggtgtgatcttggcttactgcaacctccgcctcccgggttcaaacaattctcctgcctcagcctcccaaatagctgggactgcaggcacacgccaccacgcccagctaatttttgtgtttttatagagacggggtctcaccatgtcagccaagctggtctcaaatgatccacccacctcagcctcccaaaatattgggaatacaggcatgagccactgtgcccggccggatacagctgttgagtttaacatttgtggggtgggttgttttgttgttgagatggagtctcactctgttgcccaggctgtagcacagtggcacaatctcagctcactgcaaccttcaccttgcagatttaagcaattttcctgcctcagcctccagagtagctaggattacagatgtgcaccaccatgccctgctgatttttctatttttagtagagatggggtttcaccatgttggccaggctggtctcgatctcctgacctcacgtgatccacccacctctgcctcccaaagtgctgggagtacaggcatgagccaccacgcccagtcaacatttatatttcaagaaatgttaataactactttctgaatatttgtaagacacccttgtggtaatacatacttaaaactaaattgttcattgatgttccctaaatgagtctgttccttaatgacccatcaccaattcatgatgaacttcaacaaagcttccaaaagtctcacaattcacttcagcgttgggagcacttgaagaaagtagccagcagatatcaggtatatgccactgaaatctgtattacagatataataatgcaattcttaattaaattgattgctttgcctagtcagttaaagatggttgaagatcgtttttttaactttctttaaagaaatcttcaacagttcctactgatcctcatgttggccttgtatctgcttttagaataacatcaaaaatgacaaatatggaccctggctggagtgggagattatgctccagtactgttttccacggctggatatcaatgtcagcaaaggaatcaatcatctactgaagagcccttttagtgttcatcctaaaacaggtactacacaaggaaactaaggaaaactaaaagaaaaatgagttgctattggctttagtaagcatggcattaggtctgaatatatataatgtctatgatttaaaggtagaagaattgctctgtcacccaatacctaagtcagttaagtagctaccagatgagtttctactatgtaactgtttttcagttgggtttctgaggttccatattagatttggagaggaccatcaaaatcttaggacaacagctctcattgtacagatgagaaaacagtggcccaagatgtaacccatccaaggtcataaaaaaaaaattgtgtgtgactgtatgtggtagcttgctcctgtaatcccagcacttgaggagggcaaggtgggcaaatcacttgagccccagagtctaacaccagcctaggccacatgtctaaacaccctttgtacaaaaaatacaaaaattagctagacgtggtggtgcatgcctgtagttccagctactcaagaggctgaggcaggaggatcacttgagcctgggaagttgaggctgcagtgagctgtgatggtgccactgcactccagcctgggcaacagagtgagaccctgtctcaaaaaaaagaaaaaaagaaagaaatgaaatgaactctactcctagcactgacaaaaacaaaaaaaaatttttttcgagaaagagtctcactctgtcacccaggctggagtgcactggtgcaatctcggctcaccgatcggctcaagcgatccttctgcctcaccctcctgagtagctggtactacaggcatgtgctaccacagccagctaatattttgtagacagggttttgccatgttgcccaggttggtcttgaactcttgagctcaagcaattcacctgccccagtctcccaaagtgctgggattacagacaagagccactgcgcccagcctcattacgtcacttttgagatgtgttaaattctatatggtatcctaggggggtattataaaagagtagaggaatttctattttatttcctaaatgctttttaaaggtgtctgacatgtgggtatctgtattgatctcaaataaaccaagccaatgtaaatattatagtttcatctattttgttctattttcaggactcactaactctgagattgttctgaacttaaatatggaatatttaaatatactttatttctaaatatagaaataaaagtagggataagagcaactgggaaatagctcaacagtcttcacatttgcttattggtttttgtttttgttttttttctttccttttttttcgagacagagtcccactctgtcacccaggctggagtacagtggcgcgatcttggctcactgcagcctctgccttccaggttcaagcaattctctgcctcaccctcccaagtagctgggattacaggtacccgccaccacacccagctaatttttgtatttttagtagagacggggtttcaccatcttggccaggctggtcttgaactcctgaccttgtgatccaccctcctcagcctcccagagtgctgggattacaggcgtgagccactgcacctggctggttttttaaagagaaataaaaggcatgctggacatggtcattcacacctgtaatcccagcaactcaggaggctgaggcaagaggattgtttgaggccaggagttctgggcaacatagtgagaccccaactcaacaaaaattgaaaaactggccaggccaggagcagtagctcacgtctataatcctagcactttgggagacaactgaggtgggaggatcacttgagcccaggacatcaagcctgcagtgagctatgaccatgctactgtatgtactctagcatgggtgacaaagtgaggcattaactctaaaaaagagtaagggcacagctaatgtgaaagtaatttatatttctaaatactcttcttaacagataagtttaaccctttgtctaagccttaaataaaaattttaaccaaaaataacctgtaggagatgactataatgatttatagtccacaatcatcagtttataacttttgtgtcttacaggtcgcatatctgtgcctattgatttgcagaaagtggaccagtttgatccatttactgttccgaccataaggtatgtttcagatcattgatcactccttgtttgtaattgttgttatgaattttaaataaattgaattagcctccttagagaagtagttgcatgggaatggtatatttggttatggaaaccaaataaggttcaaaggttagatgacgatgccctaatagaacaatacaagattttcacctgctgttatgtaagaaaaagattttaaggtcaagtaaatttaggaaattctgacttaaacagattaaaagtatcttttactacagtatttcacagtctttcatatgataatatgcatgaaaaactccaagaagagatcatggtgtttagaatatcccaaatttagctggccgcataatttttttacagtaaattttatgggattcacatgctattatacactggataatgctgatcagaaaccaacattaaacttctcttgttcgtggtgaggcgcggtggctcatgcctgtaatcccaacactttgggagggcaaagcgcgtggatcacaaggtcaagagatcgagaccatcctggccaacatggtgaaaccctgtctctactaaaaatacaaaaattagctgcgcttggtggcatatgcctgtagtcccagctacttgggaggctgaggcagaagaatcacttgaacctgggaggcggaggttgcagtgagccaagatcgcaccaccacactccggcctggcaacagagcaagactccgtctcaaaaacaaaaacaaaaacaaaattctcttgttctgttacttgcagcttcatctgccgtgaattggatgccatttccactaatgaagaggaaaaagaggagaatgaagctgaatctgatgtcaaacatagaaccagaggtaaggtaatattttgaagcttcactttaaatacagggtttttatatagatatccatctgtcactccagtaattaattctctgattcaactagaatggatcagcatttgtcctggaactgcatacaatgtttgtgtcctttcttcaacagcagcccaagtggtgttattgaatccagtctgattcaacacatatttcctaagtaacttttaatgctaggatctatactgtaagattaaactatcaataagtatgaataatcagtctctgagattcaccacctatttatttaacaactattatatatgcagtactttttttctttgtttctgatgcatataggtgggttttatggtaaacatatgtctaaactgtttaccaagttgtatattcaagaatttgaagaagctggctgggcgcagtggctcacgcctgtaatcccggctctttgggaggccgaggcaggcaaatcacttgaggtcaggagttcaagaccagcctggccaacatggtgaaaccccaactctgctaaatatacaaaaatcaaccaggcatggtggagggcacctgtaatcccagctactcgggaagctgagtcaggagaatcgcttgaacccaggaggcaggggttgcagtgagccaagattgtgccactgcactccagcctgggcggcagagggagactgtctcaaataaacaaacaaaaaaaaagaatttgaagaagctaaggaatttctaaatcttcctgctaatggaaggcaaatctaacacctaagagatactgcaggccaggcgcgatggctcacacctgtaatcccagcactttgggaggcccaggtgggttgatcacctgaggtcctgagttcgagaccggcctgaccaacatggagaaaccctgtctatcctaaaaatacagaattagccggctgtggtggcacatgcctgtaatcccagctgctcggaaggcagaggcaggagaatcgcttgaactcaggaggtggaggttgcggtgagccaagatcacgccattgcactccagcctgggcaacaagagcaaaactccgtctcaaaaaaaaaaaaaaagatgccgcatagcagcgcagcactccccaacctttttggcatcaggtaccagttttgtggaagacaatttttgcacggactgcaaagagagggggaggagttggggatggttccaggatgaaacttttttacctcagatcatcaggcattagattctgataaggagtgcgcaacctagatccctcacatgcgcagttcacaatagggttcatgctcctttgagaatttagtgcttctgctgatctaacataaggcagagctcaggcggtaatgctcgcttactgctcacctcacacctgtaatcccagcactttgggaggccgaggcaagaggagcctaggagtttgagaccaccctgggcaacacagagagaccctgtctctccaaaaaaaaaaatttagctagacatgctggcaggcacctgtggtctcagctactcaagaggctgtttgagcccaggaggttaaggctgcagtaagccttgaccacaccactgtactccagcctgggtgtcagagagagaccttgtctcaaaatgaaaattatgtggccgggcgcagtagctcacgcctgtaatcccagcactctgggaggtcaaggtgggtggatcacctgaggtcaggagtttgggaccagcctggccaacacggttaaaccccgtctctactaaaaatacaaaaattagccaggcatggtggtgcacacctgtagtcccagctattcaggaggctgaggcacaagaatcacttgagcccgggaggcagaggttgcagggagctgaagttgcgccactgcactccagcctgggaaacagagtgagacttcgtctcaaaaaaaaaaaaagtataatttctttcttactctttttaaagaactattatgaggattcttaattccatgcaaacgtaggatactactaaaatccaaattttatgtgaaactcctttcttattctcaatcatattttcccattgggtatcattataggttatataattaaatggatgaataaaattgtatattctttttttttttttttttttttttttttttagagaaagagtcttactctgtcacccaggctggtgtgcaatggtgcaatctcagctcattgcaacctccgcctcctgggttcaagcaattctcctgcctcagcctcctgagtagctggagttacaggtgcccgccacgacgtccagctaatttttgtatttttactagagacagggtttctccatgttggtcaggctggtctcgaactcacgacctcacgtaatccacctgcctcggcctcccaaagtgctgggattataggcatgagccaccgcaccctgcctatattaaattttttgttgtatacattttttaaactattttataaatcaaagaatacttaatgcaggccaggcgtagtggctgatgcctgtaggcccagcactttgggagcctgaggcgggtggatcacctgaggtcaggagttcaagaccagcctggccaacatggcgaaaccccatctttactaaaaatacaaaaattatctgggcgtcgtggcgggcgcctataatcctagctactcgggaggctgaggcagaagaatcgcttgaacccaggaggtggaggttgcaataagccgagattgccccactgcactccagcctgggagacagagcaagactccatctcaaaaaaaaaaaaacaagaatactcaatgtaaaaacttctaataatctccaaaagggcgtgaccagagcctgagcaacacaagaccttgtctctactaaaaataaaaaattagccagctgtggtggcactccctgtgatcccagctacttgggaggctgaggtgggaggatcatttaagccagggaagtcaaagctgcagtgagctgcaattgcaccactgcattctagcctgggcaaaaaagcaagacagtgtctcaaaaataagacatggggccgggcacggtggctcacgcctgtaatcccagcactttgggagactgaggcaggtggatcacgaggtcaagagatcaaaaccatcttggacagcatggtgaaaccccgtctctactaaaaatacaaaaacttagccgggcatggtggcacacacctatagtcccagctactcaggaggctgaggcaggagaatcgcttgaactcgggaggcggaggttcccgagccaagattgcaccactgcataccagcctggcaacagagcaagactcaaaaataaaggcatggaccgggcgcggtggctcacgcctgtaatcccagcactttgggaggccaaagtgggtgaatcatgaggtcaggagtttgagaccagcctggccaacatggtgaaaccctatctctactaaaaatacaaaaaattagctcattgtggtggcgggcacctataatcccagctagtcgggaggctgaggtaggagaattgcttgaacctgggaggcggaagttgcagtaagccgagatcgcaccattgcactccagcctgggcaacagagtgacactctgtctcaaaaaaaaaaaaaaagaaaatatatgtatatatattatatatatatatataaatataaaagacttgtatgaaagagagtatcatatatctcaatttttattacatgcaaaaataatattttagctgggcatggtggcatgtgtctgtaatcccagcactttcagaggccgaggctgggagatcactcgagctcaggagttcaagactagcctgagcaacagagtgagacctcgtctctacaaataccaaaaaaaaaaaaaaaattggttgggcatggtggtacatgcctgtagttatagctactcaggaagcagagatgggaagatcccttgagcccagtagatcgaggctgcagtgagccaagacggaaccactgtacttcagtctgcatgacagagtgaaatcctgtctcagtaataatttcaccttttttaatgtgactaatatagtatttaaaagtatgtatgtttctctcatatttcaattgggcagccctagagaattcttataagaaacttagttgtgttttcatgttattcttgctgccagtatgctaattataatgtacattcttcataatttagattataagaagaccagtctagcaccttatgtgaaagtttttgaacattttcttgaaaatctggataaatcccgaaaaggagaacttcttaagaagagtggtaagacgctatgcctttcccttctatctagttagatcttattattagtagaaatgagcaatttttgagttctagtctttctttgccctcctcccaaaatttacagatttatcttactatccttaatgttttggaaattgaggttccttaattcaatttaacacatagttattaaacacattctaagtatcaggtctataagggagacaaagatgaattaacatcatgcctccttgcccttaagaagtactaacttggccaggcacggtggctcacgcctgtaatcccagcactttgggagaccaaggcagttggatcacttgaggtcaggagttcgagaccagcctggccaacatggtgaaaccctgtttctactaaaaatacaaaaaattagctgggcgtggtggcaggcacctgtaatcccagctactcaggaggccgagacatgagaatcgcttgaaccggggaggcagaggttgcagtgagctgagatcacaccatcgcactccagcctgggcaacagagcaagactccatctcaaaaaaaaaaaagaagtactaacttaatacaaaaaaaaaagtacaaaatgctaagaaagagattttatctgatggactctgagatttcatatgaaaatggtggtatctgaactcctttcagtgtagctgctgtaagaattctaatccctagccgggtgcagtggctcacacctgtaatcccagcactttgggatgctgaggcaggtggatcgcctgaggtcaggagttcaaaacaagcctagccaacatagtaaaaccccatctctactaaaaatacaaaaaattagctgggtgtggtggtgggagcctgtaatcccagctactagggaggctgaggcaggagaatcacttgaacccaggaggcagaggttgcagtgagctgaaattgtgccatcgcactccagcctgggcaacaagagcaaaactccgtctcaaaaaaaaaaaaaaaccctaggccggacacggtggctcacacctgtaatcctagcactttgggaggccaaagcaggtggatcacctgaggtcaggagttcaagaccagcctggccaacacggtgaaaccccgtctctactaaaaatacaaaaattagccgggcgtggtattgtgcgcctgtaatcccagctacttgggaggctgaggcaggagaatcacttgaagctgggaggtggaggttgcagtgagccaagatcgcaccattgcactccagcctgggcaacagagcaagacactatctcaaaaaaaaaaaaaatttctaatccctaatgccaatatactataccataaggtatgagaaggatttccacaagcagaaatatgataagataaagggtatggaggtggaaaaaggccaagggttgttcattcttgaaggaacatcaagagcaaagacagacaggaaagcatccagttactctggaagccatcaagtagtacagctaatctagtatatggtgtgtccagaagtgatgggctataaatccaaagaagcaaactgaatggccttgaattccaagcttatgtgtttgggcttggttttgggcttaataggaagcttttaaaagttctgaggaagggaatgccatgatttgtagtttttatctagaaagataaatctgggcaagacagggactagaatagagcccaagaggccaactgcgctattgccactagaacagtagcactggagatctccgaaaggtgcaaatactggaaccatccttgagacttgctaatgatttagaagtgaagagatgaaagatggaagggaaaatgttatagaagccaggggaaagaaaagtgcaagattatcaagtgtcaggtacagtaggaaactaataaaatcctgctgcatataataactggaaagaaacacaaagaggatagcagtgtcaaatgaagggtactctaaatgggagacatatgagcatatgtataagccaatatgaaaaaaatcagcagattgaatattattcaagagatgaaggctactctagaaaactgtgacaatgttatagcaatacaaattatcttgccacttcattttttatttaaatatgtgatagtttaagcagtagtgcctaagataatgctctactcagtagacactcatatgtgtgattattggatgaacaacaactctgagcttggaaagcctggttgaagctgccattgcaactggccgtattaagtcctttgtatcctcactgttccatactagctcagcctatgatgtggacttcagcaaatgtgtaagcaaatctttgtgcatgatgtgtgttaaatagaagcattaggcaaaaaagaatgtaaaagtaaatgggctttgttttgtttcctttgctgttcttccatatattatctattctattttagatttacaaaaagatttctgaagacagagctcctcaaaccattgtggatatcttctgccttcaaccacagatcaaatacttcaagagccatttaataaatatggcagaactatatatgtgtcttaaacctcaaagtaaattttccttgagaaataa

SEQ ID NO: 96 - DNA, 44183 bp, Homo sapiens
cttgcccagactcaacatggcggctacacgtcgcctgtcagtctgtgaagcctaccccgggcgtgggccgcagcgtcgagtaacgtcattcgaaccccgtcgcgcccctttgtgcgtcacgggtggcgggcgcgggaaggggatttggattgttgcgcctctgctctgaagaaagtgctgtctggctccaactccagttctttcccctgagcagcgcctggaacctaacccttcccactctgtcaccttctcgatcccgccggcgctttagagccgcagtccagtcttggatccttcagagcctcagccactagctgcgatgcatgtgatcaagcgaggtgagggggggacgaggtgggcgagaaggaaggtgaggggatgcgggctgccgccgccggagctgatgcccagaccgcccgcccgccttcgctgcttcccgcctttcccgcatttcccgccgcggccttccgccctgtcagcccgctcggccttctgtcttcagtcagcctgccccgaacctccttcgggccttcaggctgcgccccctcggctttgtcatcctgccgcctttcaaaaggataacacttaccccgtatcgagtagtgactgcgtacgccgagcacttgccaggcactattttattcctccctgcaagcctctgagagatgattagcttattacagatgaggaaactgacgctcagagcgaggtgtcgccgactgacccaaagtcacccataggtgacaatacggtttgatttgaaaaccgtggggttggtgagctgtcttaggcacagggtcggggggcagctaggaaagaaggagggggcctctctaccctccgtaggcacttgtcagtttactgatctcttttgtggggtgaggataggagtgtggcgtggaaaaaacagatcccagacagacagcaccctcgagttcctttcccttcatgggaagagatgctgaatcagagaagggtggctgagacatcttctgacaagatggggactgggaagagtcaggaactcgtattctttctcaacagttctttttcattagacttgccaagtgcccgctttgtgcccagccctttgcttggctttgtgagattgtaggaggagacagtccctgccttgggaacaggcttcatcgggttggaaaaacaagagcaacatacttttaacaaccgcatgagatacgtatgaacaagttttgagttgaacctacttgcctttgttaaagcaatacaatgatttcaaaattgtaggcacttagtaaatactggttaatcgactggttgtttctattttgtcctctaggctgtgaacatttcaaagatggagacttgtttgagacagagtcttgctctgtcacccaggatggaatgcagtggtgtaatcatagcttactgtaaccttgaagtcctgggctcaagcgatgctcttgcctcagcctctcaagtagctgggactataggcatgcaccaccatgagtggctaatttttaaaaatttctggtagtaaaggagtcttgctgtgtttcccagtctggccttgaattcctggcctcaaaccatcctcccttccttggcttcccaaagtgctgggaatacaagcaagatggagacttttctgttcacgtttagcacaggacctgacatgaacagattcttaaagaatgaatgaaaatagttgtatcaaaatgtaggacacgatgaatgctgtgaataagcaggtagttgatttggtttaactacagccaatgtccagattggtttaactacagacaagagttggaaaggtggacagtagtggcctttcttgtttttggtatcttgagaacatcattctgtgaattttcctagctcacattttagctgaccaaagagcaaaataacatagtgcacttttattgatccattcataagagtgagagctgagcatctatttttgtatttttatttttttacattattatttatttgtatttttttagagaaggagtctcgctatgttgcccaggcttgtcttgaactcctgggctcaagcattcttcccacttcagcctcccaaagtgcttggattacagtgctgggagccaccgcacctggcttgagcatctattttttaaatctttagatatgggagagatgtttaggatggtctatgataagtcagtaacaaagatgaattgaaaatgtatggacttagatgaccagaatgggtaaaattcaaccctgtgttgaattttgaacttttagagtctacttctaaatactttcgtttaaaaagtgctaccttggcctggcgtggcagggcatggtggctcacgcctgtaatcccagcactttgggaggctgaggtgggtggatcatttgaggtgtggagtttgagaccagctgggccaacatggtggaaccccgtctctactaaaaacacaaaagttagccggacggtagtggtttgcacctgtaatcccagctactcaggaggctgaggcaggagaatcgcttgagcctgggaggcagaggttgctgaaatcgtgccattgcactccagtctaggcgacagagtgacactctgtctcaaaaaaaaaaaaaaaaaaaaaaaccacaaagtgctagctataactagctctaaaaagcagagcttattttctcattccttcatagagcacaatttgatccagatggttcatgctgtagattctgccattgtagcattcagcaagacttaatatacaacatgtacttagatttgtttgtttctttttttttttatatttctatgtttctatattttaatgttttttaatatgcatagggtttttggttttctggactttttttgtacccccttatttttggcatgtcagtggaatagcagactaactcctacagtttttgttaattttctttgagatggggtcttgctctgtcatccaggctggagtgcagtggtgtgatctcagctcactgcagtgtctgcctcctgggttcaagagattctcctgcctcagcctcctcagtagctgggactacagatgtgtgccaccacgcctggctagtttttgttatttttaataacaagggcaactggaagttgactttgaagtacctactgaatatgctaatgtcttgctaaacactgtgagggcagtaatggagaaggcagctctatcttcaaagaacttaaaattgttagggatttaggaacaatccatatgaaaattattagatagaagagaatagtagatgagtttttttcatctgctatcttgagctatttttcctaatgggagagtatcattcctcaaggagattatggttaaaaaaataaacattgagaaccattgcagtaaatgacaaagtagctaactgagttgtaaactgttttggaatttagtgtagtattttcaaaactttggattgtaactcacagtaaaaaacaaaacattttacagacatgtgtatatatgtggatacacataaaatgatacaaaagtttacgaaataatgtctttgaaagcatccatttgcactctaatctttcttttattccagattctttccctatccctgcctccctccctcccttccttcctccctttcttcctccctcccttccttccctccctccttgcttccttccttcctttctccctcccttctttcctgccctcctccctccctcccctccctctccccctccctccgtcccttcctccttccttccttccttccttcctattccattcacagcctgctaatattattttacaactctgtggataccgtgctgttcaccgggattgcagtgatgagtaggcagacatggttccagcttccaaagatcctacaatcaattgagaaagatagacaaataaagaagtaatatgataaaatatgataaatactctgataggtaaagtataggcagtagaggccattcattcagttattcataaagcatttattcagcacctctttgtgctaggaaccgttgtaggcattagagattctgcagtgaacaaagctaaattacatttctcattgagttgacttcttggtgtgggtgggagtggtaagtgtatataagaaataagaagtaaacataataatcagttaatttcagatactgattaatgagatgatagtaaaacaggatcatgtgataaagatgaatgagaaaataaccttggattgggtagccaggaaaggcttctctgagaagccaacatttgagctgaaccctaaatagtattaagagctagtaatgtgagatctgtggcctgaacattctcggcagagggaattagaaagtttgtatcctgtggaaaaggcacgcatccttggtcttacaggattagggaagtcttcctgaagagagaagaatgaaagacagtttatagccaagaggaaatcacactagtatgctagaggattttttaattttattttttattttttgagacggagtcttgctctgttgcccaggctggagtgcagtggtgtgatcttggcttactgcaacctctgcttcccaggttcaggcaattctgcctcagcctcccgagtagctgggattacagcatacccagctaatttttttttttttttttttgtatttttagtagagatggggtttcaccatattggctagactggtctcgaactcctgacctcaggtgatccgcctgctttggcctcccaaagtgctaggaatacaggctgagccaccatgccctgctggctagaggattttaaaagaggaaaaggtcagtgtgagttaaaagtggttgaggcaggttttatggaggtgtgagatttggagggtgagtaggagttagatgtatggaaaggtggaagaggaacctttaggcagagtaaggtataagcaatgatgtggatatgggaatgggaagccctcttgggacttatatttcacagggaacagttgaagagatctggggccaaactaagaaaggctttgcttgagagaagaggataatgtaggcagtgagaagcagggattagtgatgtgataaaatcaacatctggcttgaaaaactaaccaagtggaatgacagaatagagaactgtgtgtcattggacctttagatctttagtctgcctcctattttcaagtgtgagttaagataattaccaatgcacttttttttttttgtcagtttcctgattgacttcagaacttctggcagttgtagaattttctttttgctaagttgctttccccccccactgcatgtataattgcagaacgctaatgttgctttgcagttacctgcctgcttagttatccaattgctagagcactgaggtttcagtcccagtgccagccagttaatttaccccatttcagagttaaatgctgcagatgtgagcctgatgagaaaattatcacaatggtgatcagaaagagaggggctaacatatcagtgtagaagaaaaagcaacttgttctagtgataatgggttaatagtgatgtcttattgttcatttattcttcatcaaatgtttgagaacttgccttgttctaggcactaaatttgagaatacagatgtgaatcagagggccaaataaatgtaaacatatttagcatgtttcttattggttacttcaggttgagtatcccttattcaaaatgcttgggcccagaagtgtttcggattttggatttgtttcagattttggaatattcgcattatacttactggttgggcatccctaatcagaaaatccaaaatctgaaatggtccaaggaacattttctttgaacattgtgttggcattgaaaaagttttggattttggagtgttttggattttggaattttggattaaggatactcagcctatagttacaatggattgtaggtgcacaaaagagacaaaaactaaatcagtgtgagacactaacatttattgagtgcctattgtgtatcacatactgtgatttttttttcccccataggagcagctttattttataacgaggtatagttgtaactatgccaaagttgttacaacaaaagcactttttaccttatctaattttattgtcacagtaaactgattaggcaagtaaaatagatataataattaacccctttctacaaatgaagatctgtgaaatgactgattgtgttttgtggcttgtctaaggttaaggctgtttggtggttggatatattcactattcctggtaagaataaataaaggtcggatgagctactatttgaggttaaactaagagtagtaagacttttttgtctagaaggacaaagatataatctaagtccaaaatcatgaaaaatattaggtaaaatatatagtatgtcagatggggtaagtgcaatggagaaaaagcacagaaggggaagggggataagaagagcaagggtcctatttggggcattgcaatttaaaatggaatcatcagggaaagccacattgagaaggtgatgacattgagcaaaagacctaaaggagatatatagcaagaaggccaagttgtcaaggtacaataggaaggaaggtgggagagttggaggtgaaattgggaagtgggtgcacaggacaagtggtataggattctgtggatttttttttttttttagttggagtttcattcttgttgtccaggctggaatgcaatggcgtgatctcagctcactgcaacctccgcctcctgggttcaaacaattctcctgccttagcctcccgaatagctgggattataggcccctgccaccatgcccagctaattttttgtatttttagtagagacggggtttcaccatattgatcaggctgatctcgaactcctgacctccagtgatccacacccccccccgctcccttggcctcccaaagtgctgggattacaggtgtgagccactaggcctggcctgtggattgttataacaattttgacttttattctggagatcataagccactattaggagttttgaaggaggtaatgatatgattctgagtttaacttttaaagggtaattttggctgccatgtgggatgggggaaaaatttaggaaattatccgtaaacgtctgtctgtatagaattcatactctttgaaggtgacatcagagaagacaatctcttcatgaatcttttgagggggcctcaatcttttctgtgaaatagcacttcatgttggtcaatttacatgttaattacatttgattctttgacattgtagtcttaataattgctaacatgaatttaataattgctaacatgatttgattctttagatggccgccaagaacgagtcatgtttgacaaaattacatctcgaatccagaagctttgttatggactcaatatggattttgttgatcctgtaagtaaatatggtttttatcttgggttccttctttcatgtgtttctttccatttgtctcttatccctggaccttcattcacctgatatactttggtattctggctatgcccttcgatataaaatttgaattcattgcttaaaacatttttttttccttaattttggttctgtcctgtgagttctcacttttcagagaactatgaatgtgagtaaagaggaaaatttgatattaacatttaatatcagatatttccttgagtaaattgttttattcattagtggaaaagcctaggccaggcgccgtggctcacgcctgtaatcccagcactttgggaggctgaggtgggcagatcacctgaggtcaggagttcaagaccagcctggccaacatggtgaaaccccgtctctactaaaaatgcaaaaattagccgggcctggtggtgggcgcctgtaatcccagctacttgggaggcaggagaatcacttgaacctgggaggcagaggttgcagtgagccgagatcgtgccactgcactccagcctgggcgacagagcgagactccctctcaaaaaaaaaaaaaaaagggaagcctagagtaaagcttgttttggaattgtggttatttaggtagggactggtttaaaatttgttttttgttatttatgtaaaaagatttaagtaatataaagtagatttcatggacaatatttaagtcaagaacaaactattcataaaccagttgctctgcttttctccttatcctttataacttctgtattctagactctcatcatcagttatctggactgttttctgtggtctctgcagtgtcctggacttcctctaatcttaccctcttcaaactcgtcttccacctgacttctaaaatgatcttccttaaatgagaatctctaagaactctttttttcaaatccacccatatttccgtctccttatttaggtatcttatccgcactgctaaggtatcttaggtatcttatccgtaaaacctgtgctcatctcatagctttaatcatatagtatggaaattaattatggatctttgtcctcccctagaattgaggatgggctgtgtatcttattcttgtgatatcctcagtgcttgacatgtatctaattagccacttgaccaaagtaagtttggtcaagagaaaatgattttatgtatcttgaaaatatgtttattgtaaattctcttttatattgaggacttaggcaataattagaatagtagaatgttagagttggaatgaacttaagagtccatcccatttcatctttggtttatagataagaaagttccaaagagagaggggagtgacttaagttagtgggagtgtagggagaagcacctaggtctcttgactcctacatgttctattgcctcatgcagtagtacattttagagcgcaagaatgttgcagcatcctcaaacttcctagggtagattctgttgaaaaactgtcggtgcacatctgtaatcccagcactttgggagactgaggtaggcagattgcttgggctcaggagtttgagaccagcctgggcaacatggtgaaactgcccaggtgcagtggctcaatcttggcccactgcagcctccacccctggggatcaaatgattcttgtgcctcagcctccctcagctgggattacaggcatgtgccaccacgctatttttttttttttttttttgtatttttagtagagacagggttttgctatgttggccaggctcgtcttgaactcctgacctcaagttatctgtccgccttggcctcccaaagtgctgggattacaggtgtgagccacactgtgcctgccctcaaccctgtttctacaaaaaaaaaaaaaaaaaaaaaattggttgggtgtggtggcgcataccagtagtcccagctacttggtggtgggaggatcgcttgagccctggaggttgaggttgctgtgagctgagattgtgccactgtactccagcacaggccacagaatgagaccctgtctcaaaaagaaaaaaagaaaaactgtgtgctgttagatctggcacagttagcacacagatggtattttattctgagttctaattgtttgccttattgctctagaaactatttagaagacttcactgctcttatactgaacacaccttatctgctggatctgggaagaaagtgatcaggagcaacttgggcttagctatattataattagaatagattgcagactgttaaaatagttacacacgtatgtgtctttttttgaggggagtatgcattgttcagctgggaaacacatttattttctgttggattaagcggtttcttaaagattcaataaataaaccactcacaacttagaatttgtttttcttaaaaatgtatgctaataccctgtgcattacctgtcttaaaaactggaacttataatgtggccttgaaaacagtgaaatgcagtgaggtttaatgggattggggccagaagacttgtataataatataaccttgggcaagtctcagtaacctgagcctcaggttcttcatgtaaaataggtatagtaataatcatctcacaaagtgattgtgaaatgtcagagattatcaaagttgataattacttatcaactttggttgagaatcatttgaacctcgggggcggaggttgcactttgtaatttgtgaagtgctaaagaaagttgtcattaaattatcataattcagccccagacctaatttatacttctgtctcctttaattggcctgattaaagtttgattcatttgcttttctgtacttaccttatgtggaatttgggaaaagtaagtatggagctggagccctgatcacttagggagaatctgaatgaaaaatggggaaacccttatatagaatcagtctgttgggagaatttgaatgaaaaatagggaaatatagaatcattagtatgttttcagctatttccctgtgagactaatcgatttaaaggctatacttagattttttttaatgacactttcattttatatgtagtatacattttctgatagttctgctggattatgcattctcattactaagtttcccactgcccaccattctgaaagataaattttcagagaagtaagttgtcttgttctttgtttgagacagggtctcattgtgtcgcccaggctggagtgcagtgccatgatcatagatagctcagtgcagtcttgacttcctcagcacaagcaatcctcccacctcagcttaccctgtagctgcaaccacagtcacttaccaccatgactggctaatttttttatttttagtagggatggggtctcattatattgctcaggtttgtcccaaactcctgggctcaagcgagcctcctaccttggcgtcccaaagtgttgggattacaggtgtgagccactgtgcccaacctgtcgtttttattgtgatgtgaatttgattgttttcttttttctttccttttttttttttttttttttgagacagggtctcactctgccacccaggctggagtgcagtggcataatcacagctcattgcagcctcagcttcccgagtagctgggatcacaggtgtgtaccaccacacccagctaattttttttattatctgtggagattgggggcggggcagggtggtcttcctagcttgcccaggctggtctcgaactcctggactcaagccattctcccacattggcttcccaaagtgctgtgattatgggtgtgagccacaacgcctggcttttttttttaatagtgtcgtgaactgctaagcttaagtgatctcctcacctcagccactgagtagctgggactataggcatgtactaccacacctggccatgatggttttcttaattactcttttaaggaagctattgtttcttgggaaagctcaagtaattcttggttttatttttgtaggctcagatcaccatgaaagtaatccaaggcttgtacagtggggtcaccacagtggaactagatactttggctgctgaaacagctgcaaccttgactactaagcaccctgactatgctatcctggcagccaggatcgctgtctctaacttgcacaaagaaacaaagaaagtgttcagtggtaagtctggggtgaaaaagtaaaaatttagtactctcagaaaagtaataagggtactagaaataaatcttgactgtttaaagaagcaaatatggctagatggggtggcttacacctcgaatcccagcaatttgggaggccaaggcaggcaaatcgcttgagtccaggagtttgagaccagcctgggcaatgtggcgaaaccccatctctacgttttaagaaaaatctaaaattataaaatagactaggtgcagtggctcacgcctgtaatcccagtgctttgggaggctgaggcaggtggatcgctgaggtcaggagtttgagaccagcctggccaacatggcgaaaccctttctctactaaaaatacaaaaaattagctgggcgtggtggtgggggcctgtaatcccagctactggggaggctgaggcaggagaattgcttgaacccgggaggcggaggttgcagtgagctgagactgtgccactgcactcctgcctgggcaacagagtgagactccgtctcataaataaataaataaataaataaatagcaaatatgtaaattagtgggaaagagcagactacaatttcgtatttctccatgctgcctatctgctgcataaaaaggttgatggatctttgttctttttttcattttctctttttaaaatttttttattttttttgagataaagttttgctcttatcgcctaggctggagtgcaatggtgtgatttcggctcactgcaacctccgcctcccgggttcaagtgattctcctgcctcagcctcccgagtagttgggactacaggctcccatcaccacgcccggctaattttttgtatttttagtagagacgggtttcaccgtgttagccaggatggtctcaatctcctgacctcgtgatccacccgcctcggcctcccaaagtcctgggattacaggcgtgagccaccgcgcccggcccaggaatctattttaaactacaagaacttataatcactttaactctagaagattgtttccttaaatgaggcattacatatttcttcaacatatatgtgtttattgagcactttatatgctaggcattgaggtgggttgagatgacaaaaagggttgagaaccactgttttcaactattacctaaagattgaattagctgttaagtggtcttgatatattttcattttttgttgtattttttagatgtgatggaagacctctataactacataaatccacataatggcaaacactctcccatggtggccaagtcaacattggatattgttctggccaataaagatgtatgtataacacttatctggtggaaattttttgagagtcttttttaataatgcacacattttagaaaatttaaacactgcaaaagatacaggtaaatactaattctgtttcctaccctgattcctgattttcctctctagaaacaactttatcattttaaaatgtatttttccagagctattttgtacatacgtgtgtgcatacatgtgtatgtgtgtacatacatatttttcttctcagtggtactgtactgtgcatacagttttcattgatactttcttcacttgtaagtatatcttgtttgttctatatcagcctttatgaatttacccttttttataacagttgtataacgttccattttgtagatatattgtcattgtatgtatgtgtaagaattcctttagtgatcaatatttgtttttcatcttttcactgcagtgaatattcttgtatggtaggtgttttgctcatagatgaatatatctgtaagataaatcccttcagtagaattgctgagccaatgtgtatatgaattcaaaattttgataggcattgccaaactgactcccaaaaaggttgctcaggtaaaattttacaagctcatgctcagcaacttaaaaattatccacttgtgtttgaacctgtttcttaactagatgccagaggacagaagggaaaagatgtagcctagccagcccttttacacacaggatttatttaccgtgtatatctggacagattagagaccagttttaactttaggtaatataatgattaggccgggcgcggtagctcacgcctgtaatcccagcactttgagaggctgaggcgggtggatcacggggtcaggagatccagaccatcctggctaacacggtgaaaccccgtctctactaaaaatacaaaaaattagccaggtgtgggagctggtgcctgtagtcccagctactcaggaggctgaggctagagaatggcgtgaacccgggaggcggagcttgcagtgagccgagattgggccactgcactccagcctgggcaacagagtgagactcagtctcaaaaaaaaaaaaaaaaaaaaagaatgattaattgactatctctctaaacatgtatctgatgttaaagagactaggagaaaactgagttgtttgtgtgttgttaatttgtgtaatctcgaagacaagttgaagacaaaaatacagcagcagcaacagcaaaacctgtgtctaaaaatatacctattgatagtcaagtatttcagttctctaatattcacactgggcccatacctgcctttggcaacaaagatgaccttaaaattttaagagaaaaggaaagcaagctttcgtataggtttttctagtccttagatatggatcattatgtagaaacactgtcagtattttgaaaacctggctccttttttttctctccaaaatgattatttgtacgttattgcttttattttcctctgaatgactttgtagcctacaaaaactctgtaacaaggaccagttatgctctaaaatcttactgttacaatagttctttgttggaaacttgttaaaggactatagattttgaagagcctcagaattaacataagcctgcttcctgtcattgtttattatatatactgttatatacagtttgaagtaggctagcttttaaaataaatatatatatatattagtaaatatgtggtaccaatacttttggattaatagccaatctaaaaacatgtttaaggatgataatatagtcccatttatgctcatgttttttccctctttcaaaacatactataaacataatagtaaaagtttggaaaatcacatttaatctcacaacatatatttatgtattatcttctagtgttttcatatacatgtttttaaacctaattaggatacttaatttatatgtattgtttcttttttttagaatgttagatggacttctattctacagtaataatgcttagtgttatctcattgtatcctgtgttgattttagttctggagtcagggccgagagataagagattttgtgaaaataagtaattattttaatttaattatgggttctttttcacccctatcagcgcctgaattctgctattatctatgaccgagatttctcttacaattacttcggctttaaggtaaataatgggtttcaagtatgtgggaatttatacttaaatcatgaaataaaggattttgtttatgttttggtgacagttatcaaggccataagttgtttggagttgagatggacctggggaattagtggggttaaggtagcagtggtggtttgaattaaggcaaaggtagcttatctatttgcagtttttgaattttccacatattacttctggattacctgaggagttatgcagataaattaccataagtatttcataacattctaagtatttttgcgttgataggcagtatagtatagtgtagtgactgagaacatgaatgtcagtgtccacctgaattccagtctctgctctatttcttattagcaagttatttaatctctctgtgcttgtttcctccattttagaatggggagaatataaaatttcaacaacaaatttaattaaaaaaaaattttttttttgagtctgtgtctcactgtgttgactaggctggagtgcagtggcgcgatcttggctcacttcaacctctgtctcctgagtataagcagttctcctgcctcagcctcctgagtgactgggactacaggcacacaccaccatgcccagctaatgtttgtatttttagtagagacggagtttcaccatgttggccagtctggtcttgaactcctgacctcaggtgatccacccaccttggcctcccaaagtcctgggattacaggcatgagccactgcggccaatttagtttaaatttcaatttaaagtgcctataacaggctgggcatggtggcttacgcctgtaatcccagcactttaggaagccgaggcgggctgatcactcgaggtcaggagttcgagaccagcctgggccacgtggcgaaatgccttctctactaaaaaatacaaaaattagctgggcatggtggtgcatgcctgtaattccagctacttggggggctgaggcaggagaactgcttatactcaggagacggaggttgcagtgagccaagatcgtggcactgcactccagcctgggtgacagagtgagactctgtctcaaaaaaaaaaaaaaaaaaaagtgcctgtaacagaccaggcactgctctaaacaacatatacactcatttaatccgctgaggaatccctgatgtatatgttgctcatttaatccccatgaggagtcttcaggggattaaatgagtgtaacgagtgtatatgttgcttagatccgtgcctagtctgttacaggcgctttttaagtgttagctgttgtgaagttgatgatgatgatgaatactacaacttctgttaatgtgtgtagagctggctttttccagaaattttcatgcagtctctgccgaaacaaaagtgccagtgaggaggctgagatgggaggattccttgagcttaggagtttgacaccagcctgggcaacacagggagaccatgtctctacaaaacgttttaaaaagttttttttaaaaaaagtgccaatgataattctggctaacatgacgaaaccctgtctctactaaaaatagaaaaaaaaaattagctgggcctggtggtgggcgcctgtagtcccagctactcggtagcctgaggcaggagaatggcatgaacccgggaggcagagcttgcagtgagctgagattgcgccactgcaccccagcctgggcgacagagcgagactctgtctcaaaaaaaaaaaaaaaagtgccaatgataatgttccagatgaagctaggaagagtaaatgtgctattcttttcatttgaaattttatagaaacggcgaagatttaaagagattgccttattgtggatgatatatccactgcgtctttaaaaacggtgctctgaaaattttttgttgtttctctctttctagacgctagagcggtcttatttgttgaagatcaatggaaaaggtgagaaatgaacatgtttgtctgttacattttctactcattatattgaatgtatagctttgagctataagtcttaatattcttgcttagactctagataacattttggactttaggtttagtttgtggataattgtcctgtttattagtataaagtttttctagtttccttttggtgtccttttctgaaattcaaatacgtatctcaacctactttttctgacgtctcatcatgtgaaaactcctcttttgtctatagtggctgaaagaccacaacatatgttgatgagagtatctgttgggatccacaaagaagacattgatgcagcaattgaaacatataatcttctttctgagaggtggtttactcatgcttcgcccactctcttcaatgctggtaccaaccgcccacaactttctaggtaggtgttttgagtagggaaatacgccttgacctgaagaaactgggcagttagttcatcacataaaaaataatttaatgaccttttagtagctgcctgctctgattaaatgagatttagattctggaaagatctctgactgtaatgtggtaaatgaattggagaaaaggcaaatgcttataacaaaaatgttctaaaattgattggattgtggtgatggttacacaagtctatgagtatattaaaagccattgagtagtacactttaaatggggaattatattatttgtgaattatattcctttttttttttgttgttgagacaaagtctcactctgtcacccaggctggagcgcagtgttgcgatcttggctcactgcaacctgtgcctccttggtacaagcaattctcttgcctcagcctcctgagtagctgggattacaggtgcccgccaccacacccagccaatttttgtatttttagtagagatggggtttcaccatgttggtcaggctggtcttaaactcctgacctcaggtgatccacccgccttggcctcccaaagtgctgggattgtaggcatgagccaccacgcttggtgtgaattatatttcaataaggttgttttaaaaagaaggtaagtgccaagaactagttaggggactcttatagcagtttatataagaaattgtggtagtctagattagggaggtgaaagtagaaattgacagaagcagatagatcaaaagatatttagggccaggcatggtggctcacatctgtaattccaacactttggaaggctgaggtgggaagatcacttgaggtcagaagttcaaggctgccgtgagccatgattatgccactgcactgtagcctgggcaacacagtgataccttgattaagataaaaatatatataaaagatatttaggctgtcaaattgacagaatatgggtcaagaatggttcttgcatttatggatacagtaagtaacaggattaatgatgatgccatttgttgagaaaaggaacactaacggtctggtaatacattaaaaaaaaaaatatgccattatcaagttggtttgtttcaggaattcaagaacatggtaacatcaaaaaatacattaatgtaattcattgcattaacattttatgcagtttaatgctctttcataataaacactttagcaaaattgatatagaaaataacttccttaatttggcaaaagatacccaataaaaacctagatgtatcgtctcttttttcagcatggtagtggaggcctgagccagcattgtaaaataagaaaaagaaaagattggaaatcagggaacaaaactgtaatgatttgaagaaatgatttttacataggaaactcaagagcatctgcagacacattattagaaataaaagatttcagcaaaatatctggatataggttcaatatacatcaatcagttatgtttctgtactttagctgttagaaaattaagtcttaacctacagccatgcattacttaacgatggggatatattctgagaaatgtgttgtaaggtgatttccttgtgcaaacattatacagtatacttaggtaagcctagattgtatagcctactacacacataggatatatggcatggcctgttgctgctcataggttacaaacctgtgtagcatgttactgtactgaatactgtaggcctttgtattaccatggtaagtatttgtgtatccaaacatatcacagtaaaagtaccctataaaagataaaaaatgggccaggcgtggtggctcacgcctgtaatcctagcatgttgggaggccgaggcgggcggattgcctgagctcaggagttcgaaaccagcctgggcaacatggtgaaaccctgtctgtactaaaaatatagatataaaaaaactagccaggcatagcagtgtgcacctgtagtcccagcgactcaggaggctgagacaggagaattgcttgaacctgggaggcagaggttgcagtgagccaagatcgcgccactgcactccagcctgggcaacagagcgagactccgtctccaaaaaagaaagaaaagataaaaaaaaagatacaaaatgatacatctgtataggacagttatcatgaatagagcttgtaggactgaaaattgctatgggtgagttagtgagtgagtggtgaatgaatatgaaggcctggctgggcgtggtgggtcatgcctgtaatctcagcactttgggaggctgaggcaggtggatcacgaggtcaggagttcaagaccaacagggccaacatggtgaaaccctgtctctactaaaaatacaaaaattagctgggtatggtggcaggcgcctgtaatccactacttgggaggctgaggcaggagaattgcttgaacctggaaggcggaggttgcagtgagccaacatcgcaccactacactccagcctgggcaacaggagcgaaactctatcttaaaaaaaaaaaaaaaaggaatatgaaggcctagtacattactgacgactgtagactgtacaaacattgtgcacactaaatttattttaaaaatattttcttcaataataaattaaccttcgattactggatgaccactgtcgtatgtgtagtccatcgttgactttttttgtttgtttttaagacagagtctcactcttttgcccaggctggagtgcagtggcatgatcttggcttactgcagcctgcacctcccaggtccaagtgattctcctgcctcagctttacaaatagttgggattacaggcgtgcaccaccacacccagctaatttttgtatttttaatacagacggggtttcaccatgttggccaggctgatctcaaactcctgaccttgagtgatccgtcttccttggcctcccgaagtgctgggattacaggcatgagctaccatgcccggttttttaagttttttagaaatttctctaaaacatgattaaaggacattaaataataaataaatggaatagattcaattttataaaaatgtcagtttttcccaagttaaaatatagattcaaagtaattctaggcaaaatctcaacatactgattctaaaattcatgtgaaagagcaaaagactgcccaaaaatgtcaggtcgaaattcctggaacctgtaaatgttacctgataaggaaagtggtctttgtagagatgataaggattttgacatggagagattatcttgaattatgtgggtgggcccttaatccaatcaaaagtatccttgtaagagagaggctgagggagataacgactcacagaaggggagaaagtgatgtaaagatggagggagaaattggagtcatgtggccacaaaggagagcaattagccactaaaagctggacaaagcaaggaacagattctccctcaaaacctctggagggagcactccaaaaaaaaaaaaaaaagtgagttgcagacattgtgactcttgatacctccacttacctttttttttgagatggagtttcgctcttgtcactgaggctggagtgcagtggcacgattttggcttactgcaacctctgcctcccgggttcaagcaattctcctgcctcagcctcctgagtagctgggattacaggcacgcgccaccacacccagctaatttttgtatttttagtacagatggggtttgtccatgttggccaggctggtctcgaactcctgacctcaggtgatccacctgcctgggcctcccaaagtgctgggattagaggtgtgagccactgcgcctggccctacttccacttatatctcgataggagaatatataatatgacctcagagcaaaacaccatagagcaaaacattggaaaaattgactacaattaaaaacttctgtgtgaaaggcaatggaagggcaccgtggatcaataaggccgagaggcgagacaaagagggcaaaaatcttctttattgagctctcgggcgaggttcactggtccgcagggggagggccagggaagtctcgctgtgccaaaggtgcagcgtgcttttatggatgctgggtgaggagtggtcagggtaggggcagggtcggttgagtttcacgcttctgagtgtgacacgccctagtgggcatgtgcgttagtcggggtggcaggaacaggaaaggtgaacccggaaatgctgagtcagggtgtccgaggtggcgatcgccatcttggagtcttcaccggagtccaatcactgtgaaccaaaaacgaagtcaaataacaagtttcacactttgggaggccaaggtgggtggattacctgaggtcaggagttcgagaccagcctggccaacatggcgaaaccctgtctttactaaaaatacaactattagccaggcgtggtggcgtatgcccataatcccagctactcaggaagctgaggcatgagaatcatttgaacctgggagacggagcttgcagtgagccaagatcatgccactgtactgcagcctgggcaaaagagtgagactctgtctcaaaaacaacaacaacaaaaacacccaaaaaaacaagtttcagactgggagaagatatttgcaacatgttaactattgagagattataagaaaaacaaggccaggtgcagtggcttctgcctgtaattccaacactctgggaggccaaagcaaaggctggcttgagggcagaatttgaaaccagcctgggcaacataatgagagcctgtctctacaaaagtagaaaattagccaggcgtggtggtgcacacctgtagatttagctacttgaaaggctgaggtgggaggatcgctcgagcccaggaggtcaaagctgctgtgagctatgatcatgccactgcactccagcctgggtaacagagttaaaccctgtctcaaaaaaaaagaaaagaaaagaaaagaaaaacagaaagccaaatagaaacatgggcaagggctataaacaaataatgcatggaagaagaaacttgattggctaataaacgtctgagatgttaaactgtgcaataggaaaatgaaaattatgtatatatatatttgataaaaatgaaaaggctgacaattccaagcactgataagaatgtggagcacaaggaaatctcatacattgctagaaatagatttgtccatccactttggagaatctttagtaaagtgaaacgtgtatatcttttgacccagcagttcctctcctaggttcatattctacagaaatgcttagagataaacacaaggtgttgtgttcaagaatttttatagcagcattgtttggaattgcaaatgaattggaaataatccagatgttcatcaacaggcacatgggacaaatgttttggtatatttatacaatagaataccttatagcaatgaaaataaagtttgtttacatatatcaaaaggattaatttctgtaaagcaatattgaattaaaacaagttgcagaatgataaacagatatgcaaccagaaaaattctaagtgtataacatgtaaaaatgtcataaaggaaatgcttgaaaatgttagaggattgcaatgagggtatatttgtggtgtctaattttttgaggtaggtggcaagtacagagtatttgttacatcattctctatatttttctgaatgtctgaatatttatataaacacctagtcaatagatagaatccatttgcatgattgaatattcaaggcagtgaagagattattgatagagtaaggttcctgaggtggggagcaggatgagatccaaagtgaggtaaaggggttgtctttaaaaagactgtaaaggagctatgattttggtagacgtatcaaagaattggttgacaattggagagattattttcataaatgtttgtttttcttggcttactaacaacctgaaaagacggtgatgtatgtttatgaatatgcatgagaaaatgtgaaaatagcacgtttgcagtctggtgaaaatgtaagccaatattttagacttatctataagacttcctactaggcttatttacttactatctaggggaggcagcaagatgattttaaaatgatatttcgatatgttttattgtgtcatgtacagtaaagtgggttttcttctttgaaaatcatttaggaactttctaaacttcaactcttttttttttttttgccttagtgtctttgtgttgagtaatcatttttgtgactctgcttcatttccttgctctaagttgagacattttttcccccgtagctgttttcttctgagtatgaaagatgacagcattgaaggcatttatgacactctaaagcaatgtgcattgatttctaagtctgctggaggaattggtgttgctgtgagttgtattcgggctactggcagctacattgctggggtaggtttctgccatttgacttttaaagggggattcaagtctaaaagcaaacagattcatggttgagagggcatatgctattttttgggagtcctgggtctctgttaaattactaaatggctatgtgacttggagtgagtcattttacttctggcttcattttcatctatgatattagatatttagatttgactagataatctctagaatcctttttagctcaggttttagaattctggcttattttagcagtaataagagcagttatcattgattgattgcttactgtatgttaagtttgttataaatgttttacatgaggtactcatttgacccttactacaacgctatgaggtaactatgattatagactcatgccaggaattttattccttaaaataaccttgtgaataaaggtaccattgtctaattttacaagtgaggaaattgagacttagaaagttgttactttctgagatcaatcacttaatatgtggtagagccaggattcaagatttatgcattgacactttatgatgtaaactttagccctttgttagtttactgttcaatgggagtcaagataatagttttggatttaaatcctagctccactacttaactagtaatgtggcctagagttagttattttgtgtctgagtttgtttccttttctgtaaggtgaagaaaatatctaactctgtagaataaagttccagaaggaaattattccattatgttgtgttttggaggtgctgtgatatatacagcactttacacagtggtagagtgagctattgctcacttatctttctagactgtttaaaggcttgtgttgggatcagaagggttaaagaatttgatgaagtatcttctagtcgtaggagtctctattttcttaacatcattctagagtccacttattgctgagaatctccttttaccttatttattgccctgatatagctatcgcatataattcttattgtaaattgccttgatttcttttgggaaaaaggcattgtagtagtgtttatattcttttttactctacccaaagtgtatctttatataacgacctttagaagatgtagagtttaaatttagctaccttgattttggatccctttggcctgtaattgttacatctcattataaattagaaatgccatgaggtaacttagtacataattgtaatttattcaacattttgttgattttatttgggcatttttccaaagcagaagtagagatggagagcaggtaaaacttcatagattgctacctagaaattaggcatcttttttgataaaagaatggggccatttttttcttttctttgctgagtgccctctgtcatttctatcatggtctctcttttagactaatggcaattccaatggccttgtaccgatgctgagagtatataacaacacagctcgatatgtggatcaaggtgggaacaaggtatgctccatgaattgaaagtactggaaatcagaactaaaggtgatttagtcatatacacttaagatggttcatttatgtgtagtttctaattaccttttttttacttgtaaaatcaatttgaggaggtataattattttaatatgcatatactttaaatgtacagtttgatgggttttgacaaatgtatacacttgtgtaatcaccacattgataaagaggtagaacatttccattaccccaaaatcttttctccctcatatacctttacattcagtcacccctgtcacccctacccacacatactttatccctggctctagacagccactgatctattcagctttcttacatgatagttcgtttgcaaagaatttctcaagttgtaattcatataaatttgttacttgaaatggggttgtaacatgtgctctaggtttttctttcgtttttttttttatctctctcttatcacccaggctggagtgcaatggtgcgatcttggctcaccgtagccttgacctcctggacttaagtgattcttctgcctcagccctcccatgtagctcagactataggcctgtgccaccacacccagctaatttttatattttttgtagaggcgggggtctcactttcttgcctaggctgatctcaaactcctaggctcaagcaatctacctgccttggcctcccaaagtgttgggattatgggtgttagccactgcacctcgcctaggttgttcttaaaacaaaaacaaaaactacctggaataacaaaactctccctaattggctggatgcagtggctcctgccagtaatcccagcactttgggaggctgaggtgggctgatcgtgtaagctcacaagttcaagaccacgagttcaagctcacgagttcaacatgacgcaaccccatctccacaaaaaatacaaaaattaaccgggtgtggtggcgaacgcctgtagtttcagcttctctggaggctgaggtgggaggatggcttgagcccggtaggcaggaggttgcagtgagccgagattataccactgcactccagcctgggcggtagagctagaacttgtctcaaacaaaacagaacaaacaaacaaaaactctccctaattgatagaagaaacagtaaagttgagagaattgggttgtttaccttattttatcaacaggatggtttacaactagagtctgccttttgtgactgtaggcacactaatcgcttgttggtttatgaatttctctctgatggactttggggaccttgataagacagatcaactttttgacctacaataagagcatggcttatactgtcaaagcaacttcctttgggctttatgtacatgtcatgtggtgtaaagagagctgggctgttgctgaagaggaggctccatctgtagttcatcatgtcactttagaaaagttaatcttgtttcacattttgtttatatcattcgttcgtttttactcatagaattgtaaaatattacttttacaattatatatggaaaacttacacttttataatacttttatttatgttatttaattcattgtagtgaaaatcaaaggagatactataaaagtgctttgggagacatgatgtttctttgtttcatttttattctgaagagaattatgatttatttaccactagcgtcctggggcatttgctatttacctggagccttggcatttagacatctttgaattccttgatttaaagaagaacacaggaaaggaagagcagcgtgccagagatcttttctttgctctttggattccggatctcttcatgaaacgagtggagactaatcaggtgagagataggtacttgttggtaatagcaacttgattcacatgagctttctcttttttagtcatcttaagtcatgcttaggaagagcccatatgtgtgtgatgccacagaaggcattctgaacaagttaagagatgccgtgcttgtcttcttatatttctattctctaaagtagatgctttgtgacctaaatgcttaaaaggtcatgtataaacaggcagacctagatgtttgggcctgaacctgaaaatgattatttctacagcaaatttccaagagagcttgtaaaagtcaccttatgcttgcagtgtttctaatggattatggttggctatttgaagtttcttatgagtgattttgtcctttcctttttaggactggtctttgatgtgtccaaatgagtgtcctggtctggatgaggtttggggagaggaatttgagaaactatatgcaaggtatgggaaaaatatgaaagaaaacaataatgttttaatcatggtttctcttatttcaggggtccaaatatcaaaagtacttgtcaagaatcttttgaagcatctaagagaaaaagtgactaataattttggtcagatttgcttcctgactcttcaccaaaattgagttgtgtcttcttctttcttaaaactttggaatgtataaataggttcttgggatttttaattgatccttttaaaatttaagatgactagtagggttattattttgctctgtcatatagtacttttgataagctatgctttatgttgcataaaggaatcatgagtgactaggacacatatgtcagtagtttattaaaattaaataggtcaggtgcagtggctcacatctgtagtctcagcactttgggaagatgaggcaggtggatcatttgaggtcaggagttcaagaccagcctggccaacatggtgaaaccctgtctctagtaaaaatacaaaaattagctgggcgtggtggtgcacacctgtagtcccagctacttgggaggctgaggtaggagaattgcttgaacctgggaggtggaggttgcagtgagctgagattgtgccactgcactccagcctgggtgatagaacgaaactccgtctcaaaaaaaaaaaaaggaaaaaaatttagcacagtcttaagagatttggcttccttagtttttactcctttttattatgaaagatattattggtttagtgggattgcgatcatctgaaggcacctaaaactgcctcattttcccctatggctttagctagagtaaaataaatatcatattcctttttttctttagcaaaacttagagaaaatttaagagttttcataactttatattttaatgtcttcaagttgtctacaataaagtttttttagggaatatatattaaataatattatctgtgcctttcagttatgagaaacaaggtcgtgtccgcaaagttgtaaaagctcagcagctttggtatgccatcattgagtctcagacggaaacaggcaccccgtatatgctctacaaagattcctgtaatcgaaagagcaaccagcagaacctgggaaccatcaaatgcagcaacctgtgcacagaaatagtggagtacaccagcaaagatgaggtaggtagaaaaaattcttcctagagtactaagaagagaaccttaggcagttattatttgtgaattcctcacttgatttcacttgagataagtgaagggagtttgcatagttgtaagcagaagaacactgttaaaggcagagagcaaaggaaggaaagggtatgatctgtgcctataaatgttttttagtctaagccgtgtgggaaagacacagttttttcttatacacacatcactgtaataacatttactcaagaaaaatagaaatatacagttatgttagtttaggacacacacaaaaatgtgttaggatgtacattcaatttaaactatgtaagccttgagcctggaaagtggaggctgcagtgggctgagattgtgccactgtactccatcctgggcgacaaagtgagaccctgtctcaaaacaaacaaacaaaaaaccaaaaacaacaacaacaaaagtatgtaagcttataaagagagtcctttcagtgaatggtgagatcaaattctaatctcaagtctgtaaagagacttcacagaagaatcaaggctagaaatgggacatggatttggtgttttaaaaaaaagtttgagagaggagctttccatttggaaagagtggtctgtatgatacaccagagacagggctgggttttatgcagtgtggcaagtaagtctgttttgatggtgcaagtagattaattattggaatatggagagatggctatggctgggggaagggagatagaaggtagaagctgacacgtcacggataggtagcccttgtaggtttctgagaggaaaatagcatcaaaatgttaagatgaaaaggaaggttcttgcttctggttacagagtgtcttgctgtgagaagggattagaggttagcctagggagattgttgtactagttggatgacaggctgctttgatcttggatgtaaactatggaaacgaggaaggagtagatcctcaattctaggaccttaaaaaaaaagacaaatgaaaagtcaggaagtaaatggaaagtgagttaaatatactgctaaggttacagtttaattcaaaatttattgtgcagtagctatatgtaaaacacaatgttaagtgctctgagaatataaataaatatgctgccctctggaaacttctaatttagttggaagacatcgacatatattgaggtaactattatgcaagacagattatattatagaggctagagtgacatttttaaaataaaaatcagataatgtcatttgtctgcacaaaactactctttggcttgctaacccatgcagaattccttttttttcggggggcgtcaagatttcactctgttgcccaagctgggctgtggctcactgcaacctcaacagagttctttctttttgcaaattgagctataattcactctttttaaaatgtacaattcagtgttttttttcttttcttttcttttcttttttttagtatatctgcaagtctgtgcaaccattaccactatctaattgtagtatttatttattttatttttttttttttgagacagagtcttgctctgtcaccaggctggagtgtagtggctcgatctcggctcactgcaacctccgcctcctggattcaagcgattctcctgcctcagcctcccgagtagctgggactacaggcgcgtgccaccacacccagctaatttttgtatttttagtagggacgaggtttcactatgttggccaggatggtctcaatctcttgacctcgtgatccgcccacctcagcctcccaaagtgttgggattacaggcgtgagccaccgtgaccggcctgtagtacatttttatcactgtagataatgaaaccctttatccattagcagtcactccctgttcccttcttccctcagcccttgacaaccactaatatattttctgtctctagatttgtggacattgtggacattccataggaatggagtcatataatatgtggccttttgtgtcaggcttctttcacttaacatgttcttttattcatgttgtagcatgtatcagtacttcattcctttccatccagagttcttacagtgccctacaaggtcctacacaactggataacccacctcatctgcggttactttcccctttgttcactttgctccaaccctattaattttcttgctttttctcaaacatgtcaaccatgctcctacctcaggatttttgctccttcttccctcttgaatgttaaaatgcaccccctcttcccatagccacatgatttgctttctaacctgttcagttctttgttcatatgtaacattttcaatgaggtccttcttgacaattctgtttaaaaattatacccccttcatctttatccccagtactctctgtcttcttttcctgcctatttttcttcctggcatttattagacttctgtgattcaagctatatttaaaaaaatgggtatttggcaacatgtgtagaatggagtagatgtgaagggcatcaagagttcaactgggaaactttcagtagtccatgtgagagaagttaagactttggcttgggatagtcataatcaaaatggaaaagaaagtgtattcattcaacattatcaagacttactgtgtgccagatgtgttgctagtgctaaacatataaatataaataagatgatccttgtgtgaagaagctcactgcctcgtgtagtggagaaatcactggaagagctttttcagaaatcacaaattgagatccattgttgctaagggcttgtcagaatatcagtgaaggtgaggtggacgtgtgtgttttgaagaactctgcagtgatggaaatgttctgtatctgatggctattgagcacttgaaatatgactagtgcaactgagaaactcaaattttatttcattttaaatagatatatgtagccagtggctaccatattgcagggcactcatctactgaataatgagataggtatatgtaaaaagctaattataacatagtgtgatatatgtctggtaatagagctgtgtactgtggaacatagggttctctctctctcttacctattttgctgatgcatgttataactaacacatatgactaggtattgaagaaatagaatcagtgggatttagaaatggactgatgaatgatgaagagggagaagtcaaatataaaaatttaaaattttaatgtctgagtattagaggctcacatggtggtgtaattgacacaggaagtagaaataaaaattgtgtgattcttgacctgttttttgcattccaggttgctgtttgtaatttggcttccctggccctgaatatgtatgtcacatcagaacacacatacgactttaagaagttggctgaagtcactaaagtcgttgtccgaaacttgaataaaattattgatataaactactatcctgtaccagaggtatgaatagatttctctgcttattggtaattattgaaatccaaattgaaaggaatcaatcatgatcttcaagtcatcatttaaatggttatcaataaaatggtttgagaaaaagaggtagtctgtctcatttggtacagaatgttgcttttcctgttcagtaatgttttctccttttctttaaaatctgttgacacaaaggcatgcctatcaaataaacgccatcgccccattggaattggggtacaaggtctggcagatgcttttatcctgatgagatacccttttgagagtgcagaagcccagttactgaataagcagatctttgaaactatttattatggtgctctggaagccagctgtgaccttgccaaggagcagggcccatacgaaacctatgagggctctccagttagcaaaggagtaagtatatggatggaattgtttttgcctgtgagtacctgtagtgggctgaatggtgaccccacaaaaggatatgtccacatcctaattcctggaacctgtgaatttaatttcatttggttcaaaaaaaggtattttgcagatgtaattaagaaccttgagataaggagatttacctggattatccaggtgagccctaaatctaatgacagttgtcctgcaagaggcacagaaggggaagcaacgtgactatggaggcagaaattggagtgttacaaccacaagccttggaatgctgataaccactagaagttataagaggcaaggaacagaatctcttctagtgcctctggagggagtgtggccctcccaacatgttgattttgggcttctggtcttcagaactatgagagaataaatttttgttaagttaccaagtttttagtaatttgttgcaccagccataggaaacttaaatacctttgtcctctggagtaaaaaggatactctgttttaatctcttatttagaactagtcattgctaaaataatgtaagagggatgctgccaatgttagttttctgtgggttaaaacatggcattcgttatctcacagtttccacaggtcaggagtccagacttagcttagctgggccttcttttctgggtctgtgttcaagatgttggtaagggctgtgatctcgtctgagacacagagttctcttccaagcttacctggttgttggcagaatatatttcaaggactcatggcatcttgcttctttaaggccagtgggagagaccatctctcgtttcaaaaggggcacagtctagtctcttttgagggttttcacctgataagttaggtccacataggataatgtcctcaccacccccctgtcccgcttttttttttttttttttgagacagagtctcactttgttacccaggctggagtgtgtggtgtgatcttagatcactgcaacctctgcttctcaggttgaagcagttctgctgcctcaagtctcccgagttagtagagatggggttttgccatgttggccaggctggtcttgaacttgtgacctcaagtgatccgcctgccttggcctcccaaagtgctgggattacaggcatgaatcactgcacctggcgtaatcttccttttatttaactcagaatcggctgatttgcaaccttaattacatctgcagaaacctttcacctttgccataatcgctggagtgacatgcatcctattctcaagtcatgtccatactcaagtggagattataaatagcctgtgcaccaaggtgtgggaatctgggaagctgtcttagaattctgcctttcccactgcctttattatcagtactatgattctttactatataaaatgttaatttcatttctgacattcctgctgatattagaaaatctaatgtgtggttattagaaaataggtgtttttagctaagtaaacagatcaagggacagatgaaggcactgaagaaagtaacatttttagtgttaaaaaaagagaatgtgtcagccacacccttttatgaatgttagagttttctggtttgtagatatgacatgggataatcagttttcttagcctgcttctgatcaatatgactacatggaattttgtccaggaaaatctctggagcttgtattcctcatagaggttgattagaagacagcatttgttgggatgtggggacatggcagctagtcatttgtgggttttttttttttttggtcatagttttaacttgctgtagaataaatttgagttgtgtattccttagattcttcagtatgatatgtggaatgttactcctacagacctatgggactggaaggttctcaaggagaagattgcaaagtaagtgaaaagatgtaaagtagctttgaaggcagaagggtttaggttcaccttctggatcttcagaagttagatatgtcattttaacttcttaaactcatttattacaaatggggctaaaatggcctatctcacaaaactattttgggaaaaaacttcgtaagataatatatatagtaacctggaagttgcttggcacaatgaaagcatttcagtacctggtaggaattactattattagttgatcttattttagggacttaacacacctagattaggtaattttctttctcattaaggcttttttccaactatgatttttttttttaaatgtttttcattcttatttatttcccaatttagttacatcgggcatataaatggcttttgtttgaattgattgtcataggaataatggattttggaagagtttttggagggtaatgtgtttagactatatgaaaaaaaaatttttaaattgagtttttgtaggcctttcaaactaataagcataagggattcgaaggcagacagaatgttttgcagagtgaataacaaagcaaattgtttttgttttctatcgtgatgactttgtcatttatgggttaatgcatatgcaaagtgattaatatttggagaatgaagcagtagctttaaaatgctctttaaaaaaaataaccgtttgccttaaaattgttaaattaaaattgttttcctactcaaataatacatgttagaaaatttaggaaaacatagatttggaaagagaaaatgaaaattatactaatactgcctcccccagaaaacctgtgtgcatcttagtgtctgtcatcctttaggttttcttccaagagtacacatacatgtgtatttacatggaaattcaacttttaagaaaatggacctgtactgtatttatatatatatatatatatattttttttttttttttttcccctcaaaatactatggcttagttttttatatacatgactttttttctaatttcaaaattagtatatgaacacaaatttattattaataaagctcaaatacagaaataaaatagaaagtaaaagcccttcttcatacttctgccaaccatttgtctcagaaaacaaaccaaaaaagtaacttattctttttcccagagataagacttgttaatggtgtgtatttttctagatctttttcagtacatttgcagataggtacacatacacggttttgtcatataaatgtgatcaaacttgatgtattctgggctgggcaccatgactcacgtctgtaatcccagcactttgagaggctgaggtgggtggatcacttgaggtcaggagttcaagaccagcttgggcaacatggcgaaacttagtctctactaaaaatacaaaaattagctgggcgtggtggtgcatgcctgtaatcccagctacttgggaggctgagacatgagaatcacttgaacctaggaggtggagattacagggagccgagatcatgccactgtactccagcctaggtaactgtgactctgtctcaaaaaaaagacttgatgtattctgagacttgttatttagtgatttattttggagctctttctcttttagtacctgtaggtctacctaatgtttttaattattatagacaattccatagtttgaatatatcatatatgtaggacttttcacaacatttacctgtctgtagacagatgatgttgctattttacagatgaggaagtaaagacatgaagatagttggtggtttgcttgatacctcactacaaagtgacagagtaaggtggagaaccaccccccaaaaaaagtaaataaaaaaataataataactaaaaagtagagaacccagttgtattagtcgattctcacacagttataaagaactgcctgagactgggtaatttaaaaaggaaagaggtttaattgactcacagttccgcagggttggggaggcctcaggaaacttacaatcatagcagaaggggaggcaaacaggtccttctttaatacggcggcaagcaaagtgctgagtaaagggagaaaagccccttataaaaccagatcttgtgagaactcactatctcatgagaacagcatgagggtaacctcctctgtgattaaattacctcccgccaggtccctcccgtaacgtggggattatgggaactacagttcaagatgagatttgggtggggacacagccaaactatatccagttgtacagactccgtcaggatatgaggctgtatgctaagcactgtatgaatccataggtatagaatgtaggaaagacaggctctttgtgttttaaaaacttgagactaagaaaacaagtagttaaggtatacggaaaggtacaggtcagagaaaatgtttgcagagtagatatttgtatttgacatttgtatttgtgcctgcctgatgaggaaagatgttttaaaattgctatcaattaggctgagctttgaaggtgagccaggggcagttgggagatttctcagtgtgtcagatagtgtattttctcttattagtcaaaagatgttaaccttcttgcaggaacttataattgaagaatatactttgagcataatttcttcctctttacaggataatggagaattgtggtgatatttctctgattctgaacactttctcatcattatttttccagaaggggcctagcacaatgattttataggcacttggaaaagagtgagggttggatgagtgtaacctaatacaggtggggagcgcttcaacagtgatttgaatatttccctacgcaagatagtgtatcaagtgttatgattcctgagtgccacagtccaagtggcataaatcatggtatgataaggatagccaacaataaaaattgtactaattcagtttaggagtcaggcatttaagaggagagtgggctataatagcacccatactgtggaattgcctccctgtaggagtttaatttgaaagtcaacgtgtgagttcaatgcatgtacgatgttacatttacatttactacatttatctacatttactacagtgacttaaagtagctgctttcctggcagattgtagctttgggactagtacctgataatctccttttctttaggtatggtataagaaacagtttacttattgccccgatgcctacagcttccactgctcagatcctggggaataatgagtccattgaaccttacaccagcaacatctatactcgcagagtcttgtcaggagaatttcaggtgagcagttcacaaccagccttacagggagatctttcaaaagcctgatgttgggagtaaatgctcactcatgtttaatttgcccattttcttagtttgggtgcaaactttgataaagacagtcatcttcatctctaatattattatttgttattaatatttcagcacaataggcatttaataaataatctgttgaaagaatgagtgaatgagggtcgagtatgaaagtaagttgttgatagttaaacatgatgtttaaccattatgtaatcatagtgatatattctataacttctcccagatgcttaagttaggatactcaaaatgtataaagaagtatcatttaaggcagtggttctcagacttggttaccaattagaatttatggtgggtgagaccagtggttttttctttgtttttaaggttcccaggtaattcttatgtgtagctagggttgagaacctcaatttaaaagactatttgtgaatttccagatatcttgaagtaaagttctgtaaagttcgagaaggatacgtttccaatttttttaacctaagtatttatagatttacccatcttaggcgctattcttttcacttttgcaaacgccatatgtttcttttttaatgaaaatattttttcagctttattaaggtataattgacaataaaaattgtgtataaaaccaaggtatacagtgtaatgattagatatgtgtatatattatataacgattaccacaccacaatgtttttgttgtcgatactgtttttgagaaaatgtctcactttgtcacccaggctggagtgcagtggcatgatcttggctcactgcagcctctgcctcctgggttcaagcaattctcatgcctcagcctcctgagtagctgggattacaggcatgctgcgccaccatgcctggctaattatattgtttcttgaataacagatgtcaagatcttaaaggaatatagctttcgtgtggtggcattgatgtctcgtctttataaaagatagaatttaccaagcaatctagcattaaataactcttaagtgattttagtttaagcttcaaagctgtagtcttttctaagcagtcactgttatttatttcttcatacattttctgcttttccattcagattgtaaatcctcacttattgaaagatcttaccgagcggggcctatggcatgaagagatgaaaaaccagattattgcatgcaatggctctattcaggtatagaatgaaaatgaagtgtgctctgcaggggctgagttggacattgtggtacctcctcactcatgctagacaatggagagaatgacttcattgtgttcatctaggttttgcttgtgtagctctgttcacctctgcattgttgtgctaggattgtacacatctttacataacccttaccatcttgtttttatgcaataatataaaaaagtagttctcaatttttctgcatcttagaatcaactggggagcttttaaaatcctgaagcttaggttgcattccttaccaattaaatgtctaggaacaggaaccagacatcaattttttttttttttttttttttttgagacgaagtctctgtcgcccaggctggagtgcagtggtggaatcatggctcactgcaacctctgcctcctaggttcaagcgattctcctgcctcagcctcccaagtagctgggattacaggtgcctgccaccacgcccggctgttttttgtatttttagtagagacagggtttcaccatattggccaggctcctgacctcaggtgatccgcctgccttggcctcccagggtgctaggattacatgcatgagccaccgtgcctggcctcagacatcaataatttttaaagattcttttggtgattccaaagtatatcaaaatttgggggatcatagatagaaagactgaaattaagagagtcaagcttaattaaaaatcatggttgacgactgatagtccaaaagacagagtcacaaatcgtgtaaatatttgcaactaagagtcaagaggcatttatttgcagatagaggtgtctggctaaatgttggtctgcttagcaacacagatgaagagtcctataacagttccatatttaatgacagaaactgtagcattagccagtctgtgtgttttaatgaaagttaaccctaggcctaagaaaacctgattttggattccaaagggagtttgaaatcctagcttatttaaagggttttatctcattgcttcccttggtccctgtgaattacagcccttattttttgtgttttctgcaaaactcaagggtcatttattgctgcttagctctgacttttcctttctttaagtgcctctagaagaatgaatgtttgggtcataaatcaattaaaaaattaaaaaattggtttatgaccaacaaaaaagggatgctgaaattactatcaccagattgatatttggttggttagatgggggttttgttcaactttctaaatagtcttggtaaacttgataaggatcatatcatatgatactgaatggtaaggtcagatctggcaggaagtaaaatgaagatcaaagcttgtgtcactattctattaatcatacactgctttctttaactggagtaaagtaaacattgggttttccttctttagagcataccagaaattcctgatgacctgaagcaactttataaaactgtgtgggaaatctctcagaaaactgttctcaagatggcagctgagagaggtgctttcattgatcaaagccaatctttgaacatccacattgctgagcctaactatggcaaactcactagtatgcacttctacggctggaagcaggttggtagagaatatcaaggagtacttaattgccagcttgagatattttggcattggaatgattttatgttttagccacctattaaatattatcacctagaagttctttaagttcaaatccagaacgttaaaaccaacccatggtttttgtaccagaacagggtcttgccttggattttcttgtttctgttaggtttatttccttcttaggtttgaaaccttgtagttacctgtgatgctttccttcctttactgtccgtacaattaccaagttgtgttgattgttcctttgtattatttcttaaatatcttccttccttttctgctgctgttattctaaactgaccttattgcttctaggatctctgctcccagccattttgtgtgcattaccaccattcctcagataaaactttgcacacgtcaacccgctattcaaaaacatccattgttttctcactttataaagtgaaagccagcttacttagctagtcgttgccagctgtaaagtctggtgattttggattatgttcttattccctgataatgtattgggtatttaagtagaattataaatttgttttttaatttaacatttattgaacatctagtatgtgccaggactgaggatactgaatagaagatgatgatctttatctttgaagtcttatagtctgttgttacacagagacacagtctagctctctaaacagttataacctaaggcagacatattgtcttgggcaaacctggaagtcatatgcataaaaacaaagacaaaagaataaaaatgtttgacctttccaaagagataagcctgttttaggagtgaaaagaacaggatatttctgtctgactcacaaagcatttttgagagtactcctagaggagatagaattccaagtttaaaaaaagtttgatctggttcatgggaatgtattttattttatgtatgtatgtatgtattttgagacagagactcactctgttgccccggctggagtacagcggcatgatcttggctcactgcaacctctgtcctgggttcaagtgattctcatgtcttagcctcctgagtagctaggatcacaggtgtgtgccaacacacctggctaatttttgtatttttattagagatggggttttgccatgttggccaggctggtctcaaactcctggcctcaagcaattcacctgcctcggcctcccaaagtgctcgaattacaggtgtgagccactgtgcctggccaggaatgtattttattttattttaatattattgttttattttattttatacttttttagacggagtctcgctctgttgcccaggctggagtgcaatgatacagtcttggctcactgcaacctcagcctcctgagtagctgaaatttataggcatgtactacccctcttgggggattacaggcatgagccacagcgcccagccaggaatgtatttttttgtttgtttgtttgtttgttttttctttttatttatttatttatttatttttattgatcattcttgggtgtttctcacagagggggatttggcagggtcataggacaatagtagagggagggtcagcagataaacaagtgaacaaaggtctctggttttcctaggcagaggaccctgcggccttccgcagtgtttgtgtccctgggtacttgagattagggagtggtgatgactcttaacgagcatgctgccttcaagcatctgtttaacaaagcacatcttgcaccgcccttaatccatttaaccctgagtggacacagcacatgtttcagagagcacagggttgggggtaaggtcactgatcaacaggctcacaaggcagaagaatttttcttagtacagaacaaaatgaaaagtctcccgtgtctacttctttctacacagacacggcaaccatccgatttctcaatcttttccccacctttcccgcccttctattccacaaagccgccattgtcatcttggcccgttctcaatgagctgttgggcacacctcccagacggggtggtggccaggcagaggtgctcctcacatcccagacggggcggcggggcagaggcgcccctcacctcccagacggggcggctggccaggcggggggctgaccccccacctccctcccggacggggcggctggccgggcggggggctcacacccccacctccctcccggacggggcggctggccgggccgggggctgaaccccccacctccctcccggacggggcggctggccgggcagaggggctcctcacttcccagtaggggcggccgggcagaggggcccctcacctcccggacggggcggctggccgggctgggggctgactccccccacctccctcccggacggggcggctggccgggcggggggctgacccccccacctccctcccggacggggcggctggccgggcagaggggctcctcacttcccagtaggggcggccgggcagaggcgcccctcacctcccggacggggcggctggccgggctgggggctgactccccaacctccctcccggacggggcggctggccgggctgggggctgactccccaacctccctcccggacggggcggctggccgggcggggggctcacacccccacctccctcccggatggggcagctggccgggcggggggctgacccccccacctccttcccagatggggcggctggccgggcagaggacctcctcacttcccagtaggggcggccgggcagaggcgcccctcacctcccggacggggtggctggccgggcgggggctgacccccccacctccctcctggacggggcggctggacaggaatgtattttaaatattggtgtggaatgtctagtattctcacagagtttctcctaataattgtctttactttccttgtagggtttgaagactgggatgtattatttaaggacaagaccagcggctaatccaatccagttcactctaaataaggagaagctaaaagataaagaaaaggtatcaaaagaggaagaagagaaggagaggaacacagcagccatggtgtgctctttggagaatagagatgaatgtctgatgtgtggatcctgaggaaagacttggaagagaccagcatgtcttcagtagccaaactacttcttgagcatagataggtatagtgggtttgcttgaggtggtaaggctttgctggaccctgttgcaggcaaaaggagtaattgatttaaagtactgttaatgatgataatgattttttttttaaactcatatattgggattttcaccaaaataatgcttttgaaaaaaagaaaaaaaaaacggatatattgagaatcaaagtagaagttttaggaatgcaaaataagtcatcttgcatacagggagtggttaagtaaggtttcatcacccctttagcactgcttttctgaagacttcagttttgttaaggagatttagttttactgctttgactggtgggtctctagaagcaaaactgagtgataactcatgagaagtactgataggacctttatctggatatggtcctataggttattctgaaataaagataaacatttctaagtga

SEQ ID NO: 97 - DNA, 79107 bp, Homo sapiens
cgggcgcagggagccgccgccggggctgtaggcgccaaggccatgtccgactcgtgggtcccgaactccgcctcgggccaggacccagggggccgccggagggcctgggccgagctgctgggtaggtgggcgcggcaggccgcgggagtgggcggcgtccggcccgggacggtttcgccggttccccgatcccttcccgccagagcctccgccggtcggatccccggacgccgcgcccggggggctgtgcggggtgggcgcccggctggggcggcgcggctgcctcggacccggcccctcctgcgcctgggcggacgcccccagccgccgcccgcggggcgctcccttctttcccgaacgccgcccccgccggccgccctgtcaggcgggcctggggtgcgcggcctggggctcccctcagcgcagaggccgcccctcgccagccgtccccgggctcccctgcctcgggccctcctgggccgtcttccccggcgtccgcggtggggccgtctccgttagtttcccgagacctgcgccctggggaggagccccggcccctcttcgggagggtgtcgctggtgggtttctccgcggcgtccacctgcgcgtcgggccggggaccccgtgtgtgaattgtgctgtgatggtttcgaaccgacttctctccgtagcgggaagggtcaagagggaaaaatataatcctgaaagggcacagaaattaaaggaatcagctgtgcgcctcctgcgaagccatcaggacctgaatgcccttttgcttgaggtaagaggaagctggtgtccgtctgcgggcagatttaggttcggggtttttgagtccagccaccgcacagctttcctaagaaaacacccgaggcggcgggcgcggtggcctggcccgcagaggggagggtcgcctgagcccgggagttctggaccaacctgggcaacggggtgagaccccgcctcttttattaaaaacaaaacaacaacaacaaaaaaacaggccgggcgccgtggctcagggctgtaatcccagcttttggggaggccaaggcgggtggatcactcagggtcaggagttcgagaccagcctggccaacatagtgaaacccggtctctactgaaaatacaaaaattagctgggtgtggtggcgcacgcctttaatcccagctactcgggagcctgaggcaggagaattgcttgaacctggacccgggaggcagaaattgcagtgagccgagatcacgccccttgcaatccagtctggattacagagtgagactgtctcacaaaaaaaaaaaaaaaaaaaaaaaaaaaaaaagccgggcgtggtggctcacgcctgtaatcctagccctttgggaggccgaagtgggtagatcacttgaggttaggagttcgagaccagcctgaccaacatggtgaaaccccgtcactacttaaaatacaaaaattagccgggtatggtagcaggtgtctgtaatcccagctgctcaggaggctgaggcaggagaatcgcttgaacctgggaggtggaggtcgccgtgagtgagatcccgccattgcactccagcctggacgacagtgagactccctctcaaaaaagaaaaaaaggaaaatagcccagtagggaagcattacttacacacaggttgtgtttatgcacagatcttgaattttttttatttttattttttattttcatttattttttttgagacaaagtctcacactgtagcctgggctggtatgcagtggggtgatctcggctcactgcagcctccacctcccgggtttaagtgattctcccgtctcagcctcccgagtggctgggactacaggcacgcgccaccatgccctcctaatttttgtatttttagtagagacagggtttcactatgttggccaggctggtctcgaactcttgacctcgtgatctgcccatctcggcctcccaaagtactgggattacaggcgtgagccactacgcctggcctggagcttgaattttttaaatggagtttgttgtgttttggattctaggtagaaggtccactgtgtaaaaaattgtctctcagcaaagtgattgactgtgacagttctgaggcctatgctaatcattctagttcatttataggtaagttatagcttcattttctctattttgaattgcagaagggtttttatatagtaaccatagtttgctaaattaagtagaaatgtaaattttctcaggcgatgggtttccactggtgtgtgtagtcgcaaattctatgggatgtttgtgtgacttgctcttgggcttcttacgatgctgtgtttaaaaacagcgtctgattcaacctgcgactcagaagcagtaggacccagagtgtcccttggaaaaacatgggacatagcaacagcagggatgtgccccttgctcatggaagtagtgagacaggctgtggtgtgcccaggagagcagacgggagaacaattttctaggtacctccttctccccccagtttgagagtgggagatagggtaagttctgggtcaacaacagtaagttattttctgatccttcacgtccttatgtgatgacttgtttctgttaaaataaccttcagtaatagcgctcccttgacaactggtcactgaatgtcattggcaaatgatacagattttcactgccatgattgtatttgaatttcacaaattgcatattatcattccaaggaaccaagctcagccacacagataaacctttaattcattaatttttgagtttgtttttttctgctaaagatatagttagtacatgcacgcacgtgcacacggacacacacacacacacacacacacacagtaaaagacttgtagataaaaaaactttcctatggagacacattggaaacaaatgactagaaattggcattgttggcctggcacagtggctcacgcctataatcgcagcactttgggaggctgaggtgtgcggatcacctgaggtcaggattcgagacgagcctggccaacatggtgaaaccctgtctctactaaaaaacacaaaaattagccgggtgtggtggtgggtgcctgtagtcccagctattcaggaggctgaggcaggagaattgcttgaacgtgggaggcagaggttgcattgagccgagacccctccattgcactccagcctgggcaataagagcaaaactctgtctcagaacagaaaatggcattgtctacttttttttttttttttaacagacagggtctcactctgttgcctggactggagagccgtggtgcaatcacggctcactgcagtcttgacctcctggcctcaagtgatcctcccaccccagcatcttgagtagctgggactacaggtgtgcgccaccatgcctggctaattttttcatagagacagggttttgccatattgcccaggctggtctcaaactcctgagctcaagcaatcagtttacctcagccacccaaggtgttgggattgcaggcatgagccactgtgccccatctgtctacttttctaccgagaatttcaccagcagctgatgatttctcgtactataattttaagcttctagaactattgtaaaattttttttttttttttttgagacgaagtgttgctctgtcgcccaggctggagtgcaatggcgccatctcggctcactacaaactctgcctcctgggttcaagcaattctcctgcctcagcctcccgaatagctgggattataggtgcccgccgccgcacccagctaatttttgtatttttagtagaggcggggtttcaccatcttggccaggctggtctcaaactcctgacctcgtgatcgacccgcctcggcctcctgcagtgttgggattacaggcatgagccaccgcaaccagcctgtaaatgtttttacttatgtattgataatgtgtttttagagccagtacattacaataacaggttcgtactgcagttaacagttttttttttttttttttttttttgagacggagtattgctcttgttacccaggctggagtgcaatggtgtgatctcgactcaccgcaacctctgcctccctagttaaagtgattctcctgcctcagcctcctgagtagctggtattacaggcatgcaccaccacgcctggctaattttgtatttttagtagagatagggtttcaccatgttggtcaggctggtctcaaactcccgacctcaggtgatccacccgcctcggcctcccaaagtgctgggattacaggagggacccactgagcctggcctccagtttttttttgttttgtttttttgagatgaagtctggctctgtcgcccagactgcagtgtagtggcgtgatctcggctcactgcaaactccgcctcctgggttcacgccattcttcgcctcagcctcctgagtagctgggactacaggctcccgtcaccaaacctggctaattttgtttttgtgtctttagtagagacagggtttcaccgtgttagccaggatggtctcgatctcctgaccttgtaatccgcccgcctcggcctcccaaagtgctgggattacaggcgtgagccaccgtgcccggcccggtttctttaaacaattaattttggctcacgtggtggctcacacctgtaatcccagcagtatgggaggccgaggcgggcggattaatgaggttgggaattggagacgagcctagccaacatagtgaaaccccatctctactaaaaatacaaaaaattaactgggcgtagtgacgcgtgcctgtaatcccagctacttgggaggctgaggcaggagaatcgcttgaacctgagaggcggaggttgcagtgagctgagatggcgccgttgcacttcagtccaggcggcagtgtaagacaccattgcaaaaaaataaaacaaaaaaaaattaattttggaagacaaataaattagaaaatgatttcttggcattgcctgcttccaggttgcccaccgtttctcactttattgaatgcagaccagtggctggttgctcaggagaatggtggctgcctgcaggctgttagtgaggttccacttggtggcctgcggactgagcacagctgtgactgcacctgcccaccaggtgcatggcagaatgttgggaaatccctgcctaattttatcacaaccatcaatgtgagtcaacaggggcaggcttatctctgaagtaattagaaaaacaatgtaattgaaagagcctgctgcagttctcaatttattgtgctcctttgtaaaaagatgataaagttcttggtcagaatatatttctttatcttgctccttttgtgtcatgggaaacgtaacaaataccaatgtataactctgggttcaggtgttgccaccagttttattgtgagctgcttggatcatcaaattctcatttttatctcatgtttttccctttgcatctattctccccgtttaaaaggcaattttttttgtgctgcatcttaaaataaggcattttaaacagcaagtctttggttttagattttgtctcatgtgttaagagaaagctatggttttgttttgtgtttaaggctctgctttgcaggatcaagcctcaaggctgggggttcccgtgggtattctctcagccgggatggttgcctctagcgtgggacagatctgcacggctccagcggagaccagtcaccctgtgctgctgactgtggagcagagagtaagacaccagcaaagatgaggaaacctgcccgttgttacttttaagctggttgggaaaataggacatagctttagtattgtttcaggtaatttgttttttaaaaaatgtaatctctcttttcagaagaagctgtcttccctgttagagtttgctcagtatttattggcacacagtatgttctcccgtctttccttctgtcaagaattatggaaaatacaggtaaatttgagattgcaaatctgactctccagtgttccaggcaatgttctgttgatctggatggaggcaacagagtacctgggttttcttgggaattctccaagcttctcattaattacagagagtggatgaaaaagggtttagaaatcatctgtggattggaaagaagtaccttcaattgccattttttgtccctattcacctatcattagtaatatttattagactagaatatattgaaaaacacgtttagccttgggtatattagtatggagaattttccagggtagtatagtaaactattaaaaaaaaatgtatgtaatttttttttccagagacagggtctcgccttgttgcccaggctggtcttttttttttttttttgagacgaagtctcgctctgtcgcacaggctggagtgcagtggcgtgatcttggctcactgcaagccccacctcccaggttcacgccattctcctgcctcagcctcccgagtagctgggactacaggtgactgccaccacgcccagctaattttttgtattttttagcagagacggggtttcaccgtgttagccaggatggtctcgatctcctgacctcgtgatctgcccacctcggcctcccaaagtgctgggattacaagtgtgagccaccgcgcctggcatttatttttatttttgagacagaatattgctctgccgcccaggctggagtgcagtggcgcaatcttggctcactgcaacgtctgcctcccaggttcaagcgattgtcctgcctcagccaccttagtagctgggattacaggcgcgtgccaccatgcccagttaatttttgtatctttttttttttttgagatggagttttgctcttgttgcccaggctggagtgcaatggtgctatcttggcttatcgcaacgtccgcctcccgggttcacgccattctcccgcctcagcctcccgagtagctgggattacaggcatgcgccaccatgcctggctaattttttttgtatttttagtagagacggggtttctccatgttggtcaggctggtctcaaactcctgacctcagatgatctgcccacctcggcctcccaaagtgccgggattacaggtgtgagtcaccgcgccctgcccaatttttgtatctttagtagagatgaggtttcaccatgttggccaggctggtcttcaattcctgacctcaggtgatctgcccatcttggcctcccaagtgctgggattacaggtgtgagccactgcgtccggcctttcccattcttttatccagcatacattatagaattcattagatttttcagttattgctttggtccctgccctcattatcacgtagcttgggaaacaagccactaaatccacaagaagtgcgatgattcatgtgctcacagatttgcgaagaagatgttggacatgcatatcagattggagagttaggaaagccttcctgcacggactgtgaagagtgcgagttaggggccgggcccagtggctcacacctgtaatcccagcactttgggaggccgaggcaggtggatcatgaggtcaggagatcgagcccatcctggctaacacggtgaaaccccgtctctactaaaaaatagaaaaaattagccgggtgtggtggcaggcacctgtagtcccagctactcaggaggctgaggcaggagaatggcgtgaacccgggaggcagagcttacagtgacccgagatggcgccactgcactccagcctgggtgacagagcgcgactctgtctcaaaaaaaaaaaaatagagtgtgagttagggggatgagaaggggaggctgcagggagatcagggcagtgtgacaggcacagtgttcacagtgagtggctaaagcagatcctgttttatcaaatgggagagggttgagtgagaaagacaagggacatgcacagggcacactgaagcctgacctttgtcctggcagcttcgaggagccagtgaaggcttctgaaggagagactgtcatgtcagtgtgtgtaatactgtgttggctgtagtgtggagaaagggttagaagtaggctacagtgcgtaggaagagagaaggaagagaagcaagtgttgggcaacggtgtgtgggtgcccaaaggccagggagtttgaaaaccagtacagctttgtaaaaaaagatgtgtttcaggctctaagtttttgcttgaggttaattttcaatacggcatggttaagaacctaagttgaacattttgtaggaaaatgcattcataaaggactcagaatgctgggggtttttttgtttttgtttttgtttgttttgttttgtttttcagagttctttgttgcttgaagcggtgtggcatcttcacgtacaaggcattgtgagcctgcaagagctgctggaaaggtagcgtgctaatgatgattcagtgttactgtttttgcagtctagtctagtataaattatatttcaaagcccagaatcagacgggtttgatttctggctttgacatataatttgtactagactagattgcattgcatatttatactagactagacctggaggaactattgctttattatttcaagagaacgtttatggtgttttggttttgtttgctttttgtctgttttttttttgagacggagtctcgctctgtggcccaggtgggagtgcagtggcacgatttcagctcactacaacctccacctccagggttcaagcaattctcctgcctcagcctcccaagtcgctgggattacaggcgcccgccaccacacgcagctaatttttgttatgtatttattttttttagggacagagtctcgttctgtcacccaggctggagtgcagtgacgtgatgtcggctcactgcaggctccacctcccgggttcacgccattctcctgcctcagcttcccgagtagctgggactacaggcgtccgccaccacgcctggctaatttttgtatttttagtagagactgggtttcaccatgttagccaggatgggctccatctcctgacttcaggatctgcccgcctctgcctcccaaagcgctgggattacaggcatgaaccactgtgcctggcaatttttgttatttttagtagagatgtggtttcgccatgttagccaggctggtgtcaaactcctaacctcaggtgattcccctgcctcggcctcccaaagtgctgggattacaggcatgagccacctcgcgcggcctttttttttctttttgagacagagacctgctatgtcgccaggctggagtgcagtggtgagatctgggctcgctgcaacctccgcttcccggattcaagcaattctgcccctgcctcctcagtagctgggactacaggcgcgtgccaccacacccggctaatttttgtatgtttagtagagatggggtttcaccatgttggctaggctggtctcgaactcctgatcttgtgatcctcccgcctcggcctagagcagaatttcatctcaaaaaaaaaaaaaaaaagaaaaacctgcttcctaggatatacacatcttatctcagcaccaaaatctatgaagcaaaaatggccagaattaaagggagaagtagacatttcagcaataatcattagaggtttcaatactcccctttcagtaatgggtagaacaagttagattaagaatgatatagaacagccgccccgtccgggagggaggtgggggagtcagccccccgcccggccagccgccctgtccaggaggtgaggggcgcctctgcccggccgcccatactgggaagtgaggagcccctctacccggccaccaccccgtctgggaggtgtacccaacagctcattgagaacgggccatgatgacaatggcggttttatggaatacaaaggggggaagggtggggaaaagattgcgaaatcagatggttgctgtgtctgtgtagaaagaagtagacacgggagacttttcattttgttctgtactaagagaaattcttctgccttgggatcctgttgatctgtgaccttgcccccaaccctgtgctctctgaaacatgtgctgtgtccactcagggttaaatggattaagggcggtgcaagatatgctttgttaaacagatgcttgaaggcagcatgctcgttaagagtcatcaccactccctaatctcaagtacccagggacacaaacactgcagaaggcctcagggtcctctgcctaggaaaaccagagacctttgttcacttgtttatctgctgaccttccctccaccattgtcctatgaccctgccaaatccccctctgcgagaaacacccaagaatgatcaattaaaaaaaaaaaaaaaaaaaagaatgatatagaagttgaatgctgcaaaccagctgacctgactgactgtggagcactctacccagtagtagcagagtgtgtattcgtaagtccaaatggaacagtccccaggatacagcataaggttcaggccaaggccaggtgcggtggctcacacctgtaatcccagcactttgggaggctgaggcgggcagatcacctgaggtcaggagttcaagaccagcctgtccaacgtggtgaaaccctgtctctactaaaattacaaaaattagctgggcaaggtggcaggtgcctgtaatcccagccgttgtggaggctgaggcaggagaatcgcttgaacttgggaggcggaggttgtagtgagctgagattgtgccattgcactccagcctggatgacaagagcaaaactgtttcaagagaaaaaaaaaaggttcaggccataaaacaaagaggaataaatttagaagggctgaaatcattcaaaatatgttctctaaccacaaatgaatttaattagaataaacaacagaagggaattgggaaaatccacaatatttgaaagttaacataatgagtcaaagaagtcacaagggaaattagaaaataacttgagactgggcacagtgccacaccagtcatcccagcactttgggagggcaaggtgggagattgttttgagcccgggagtttgagtccagcctgggcaaagtagtaagacctccagctgggcgtggtggtatgcgcctgttgtcccaactactcaggaggctgaggtggaaggattgcttgagcctgggaggtcgagggtgcagtgactgattgcgccactgcactccagcctcagtgacagcaaaaaactgtctcaaaaaaaaaattgggacatatggctcaactcaatcccctgatgatgggatttagttgagccttacgtctgcctctgtgtgtgtctccagccatcccgacatgcatgctgtgggatcgtggctcttcaggaatctgtgctgcctttgtgaacagatggaagcatcctgccagcatgctgacgtcgccagggccatgctttctggtgcgttcatgacaagatgcgggttcttgggtaaaactcattttgatctgtgataatgccttctgctctcaagagctctgcgaggcagaacagcctgtctctccgtggccgtgggaacctggcatgacagactcccagtctcagcctgttgtggggttgcattttacttgactgatgtggaaatactagtaagtcggccttgacatgagtttaagtgtttccattcacctttcccatagagtgaccgcagctgcttccttctgtcgcccaggctggagtacagtggcgcgatctcagctcactgcaacctccgcctcctgggttcaagtgattctctgcctcaacctccttagtagctgggactgcaggcacgtggcaccatgcccggctaattttttttttgtatttttagtagagacggggtttcattaggttggccaggctgctcttgaactcctgacctcgtgatgcacccccctcggcctcccaaagtgctgggattataggcgtgagccactatgcctggccttcctgaggaatgatattatgagaaaaacttgggactgtaatgtccccccacaaactaagaaggtgctgagagaccagaggatggctcagactagggaccaacccagtttgaggagtagttgggtttgtcagaagatggcttggaccagagtccagcttgaggagtagttgggcttgtcagaggatggctcggaccagagtccagcttgaggagtagttgggcttgtcagagaatggcttggaccaatccagcttgaggagtagttgggtttgtcaggacttatattcagcgcactcctggacggcggcaggacagctctagagaaccgccccaccacctgtctctaaggtgcattgaagctcgttttctggctctttgcctgctgtgtttgagtgatgagactcttttccttggtgagttctcagatcctctctgggatatttgggttctgaggaacacctgctgggagacccatcccactacaagtgacacctacaaataaaaattagatgagaaactgatctgtacagtagcttgtgggttttttcctttttcctaaagctttttggtggcatgagcgacttagcattcctgagctactataacctggtaccagataggttaaatttaaatcaaagttagaaaatcttgtggatttcagtcctcttggtcttattttttaaaaagctaagaatgcctttcctcccccatcacattcctcagaataggatgcttctgggtccctctagaccctctggtattggagattggcaggcaagacaatccataagacctcccttggaaaccacttttatttaagagaaaaaaattgggctgggtggggtgactcatgccagtaatcccagcactttgggaggccaaggcaggtggatcatgaggtcaggagttcaagaccaacctggccaagatggtgaaaccccatctctactaaaaatacaaaaattagctgggtgtggtggcggcgcctatattcccagctactggtgaggctgaggcagagaattgcttgaacctgggaggcggaggttgcagtgagcgagatcataccattgcactcaagcccaggcgacagagcaagcctccgtctcacaaaaaaaaaaaaaaagaaaaaaatctgactataaacttgttccctttcaaatagaagtgcaagaggaaaaaatctggttcatctaagggtcctgattgggtttggtgaacgctagtgtagctgtggtcaggtgagcagtaacttctgcagcgttcctcaggttaggagcagctcacaggggtcctggtgggcccaagccatatgctcacccgcccctctgaagtggatggtctgtgccattcacagttgcttggagaccatgatgtccataaataactttggttttatggtttttcagattttgttcaaatgtttgttttgaggggatttcagaaaaactcagatctgagaagaactgtggagcctgaaaaaatgccgcaggtaggaggaaaagtcaagtgaagagtttagcggaaggagccgtccttattccaagtgttgaaatgtatttacgtgtctctctattgaaacgtgctgtttgtacctatttacggggtacatgtgatacttgttttgtgcatagagtgtaatgatcaagtcagggtgtttagagtctccgtcacctccagtatgtatcatttctgtgtgttggcaacatttcacatgttgcagttactttgaaatatacaatctgttgttaactatagccgcctcactctgctgtggaacattagaacttacttcttctgtctagctgtatgtttgtacccattaaccaactctcttcgttcccccactgcatatacccttctcatctctggtatctctcgttctactctctacctccacaagagccactttttagctcccacatatttgtgataacatgcaatatttgtccttctgtgcctggcttatttcacttaacataatggccttcagttgcattcctgttgctgtgaatgacaggatttcactttaaaaaaaaagaatagctggccgggcatggtggctcatgcctgtaatcccagcactttgggaggacgaggcgggcggatcacaaggtcaggagatcgagaccatcctggctaacatggtaaaatcccgtctctactaaaaaaatagaaaaaattagccgggcctggtggcaggcacctgtggacccagccactcaggaggctgaggcaggagaatggcgtgaaacctggaggcggagcttgcagtgagcccagatcgtgtcactgtattccagcctaggcgacagagactccatctcagaaaaagaaaaaaatagctgaggttgggctcaatggctcatgcctataatccagcactttgggaggctgagactggtggatcccctgaggtcaggagttcaagaccagcctgaccaacatggtgaaaccctgtctctagtaaaaaaaaaaaaaaaatagccgggcgtggtggcacatgcctgtagtcccagctacaggcgtggaggcaggagaattgcttgaacccaggaggcggaggttgcagtgagccaagattgcgccttgcactctagcctgggtgacagagcgagactccgttaaagctgaccagtattccgttgtgtgtatataccacgttttctgtatccggtcatctcttgttgggcacacaggttgatttcatatcttggctattgttaatagtgccacaataaatgtaggagtacagatgtctcttcagctggctgatttcctttcctttggctgtaagcccagtaatgggattgctggatcatatggcagttctggttttttttttgtttttttgtgtttttttgagacggtgtctctctctgttgctcaggctagagtgcagtggcgcgatttcggctcactgcaacctctgcctcccaggttcaaccgattctcctgcctcagcctcccgaatagctgggattacaggcatgcaccaccatgcccagctaatttttgtatttttagtagaggtgaggtttcactctgttggctaggatggtctcgatctcttgacctcatgatctgcctgccttggcctcctgaagtgctgggattacagatgtgatccaccatgcctggtgaaagtgagaccctctgggctggtagttctgtttttagaactacccaactatttagaaatctccatactattttccataatggctgtattaatttacattctcactgatagcatataagagttctgtttgcattctcaccagcatttgttattttttgttttcttgataatgataattctaactggagtgaaataatagctcattgtggctttgacttgtatttccctgatgattagtgacattggcttttttttttttttttttgagacagagtcttgctctgtcgcccgggctggagtgcagtggcgcgatctcggctcactgcaagctccgcctccggggttcacgccattctcctgcctcagcctcctgaatagctgggactacaggcgcccaccaccactcccggctagtttttctatttttagtagagatgggctttcacagtgttggtcaggctggtctcgaacttctgatctcatgacccgcccaccttggcctctcaaagtgttgggattataggcgtgggctaccgtgcctggcctttttttttcttttttcttttttttttttttgagatggagtcttgctctgtctcccaggctggagtgcagtggtgccatcttggttcactgcaagctccgcctaccgggttcaagctattctcctgcctcagtctcccgagtagctgggactatagacacccgccaccgcacctagctaatttttttgtatttttagtagagacagggtttcaccttgttggtcaggctggtctagaactcctgacctcaggtgatccacccacctcgacttccgaaagtgctgggattacaggcgtgggccacagttcccggcctgtttctgggttctctatcctgttccgttggtctgtgtgtatgtttatatcaacctcatgctgttttcatttctgtagcctcgtagtatattttgacctcaggcagtgtgatttctatattctatagctttgttctttttcctcaggattgctttgcttatctgtgttctattttggttccatgtgaattttagaatctttttttctatttctgggaagaacgttattggtattttgatagggattgcattgaatctgtagatagttttggatacgtcccaaatttttattcccttttggaggttcctgagccagtggctcccattttgcctacactgcagtctgtgggctttgtttgaggaagtctgttttattgttaccatgagttgctctctgagtagtggtatgctttaagcccaggagatgtgaagaagggaaatggacaatggtaccttctcaccgtcttctggctccagaggcatcaagggtgaaagtccttagttccacagcccagattcaaggcctgagctttcctctcttcactgaagtacttcagcaaaactctgcgtgcaaaagtgtcctgcccagccctaggctcatggcctcaggccatgctgagagcagtcttagggtaattccagaaagttcagccttttcactctgtctaggtcccttcggtactggagtaatttctaggtctatgagggtttttaaagttgatctctttgtaaagtccatttctttttcttttttccgagacggagtctggctctttcgcccgggccggactgcagtggcactatctcagctcactggaagctctgcctcccgggttcacgccattctcctgcctcagcctcccgagtagctgagactacagggcgtccgccactgcgcccggctaattttttgtatttttagtagagacggggtttcaccatgttagccaggatggtctcgatctcctgacctcgtgatccgcccgcctcggcctcctgaagtgccgtttctttactttagagtaacaagtaataattctcttgtgtgatgcaggtatcacacaaattacagaagattaccaagatggtaactcacattctattttgacaggtcacggttgatgtactgcagagaatgctgatttgtaagttaattgcactgcagcccagactgtaaatgacttagtttgcttattagcaattgtatcagttttctgcctttccatttgaggtatttctcctctgtatgtttcactgtgcagagtcctggtactggaatgcccttgttttggcattttcagagctgtgaagggatacctcatgaatctgtgggtcacagggaagcattttcttgtctgtgtgttttgattaaggcctacagattgtagaagtcttgatggatgtgggccctctggggggttgaagtggatctgttgtctgaaagcgcctggggattgtttctggtgggctgccgccgtgtgctgacatctgttttctgttcctggctctgtcttcagttgcacttgacgctttggctgctggagtacaggaggagtcctccactcacaagatcgtgaggtgctggtatgttcctgagggtggcctgcctgagtgtgcagcagggaggtgtctgccaaattaaagagccaagatattttaaacacttccagagcttcagcagcccgctcctgagcacacttcctctgccagttacgataacgtgcgtgaggaggaggcgaccatgggaaagcccggggaacgctctggtcagccttttcctgtgaggatgaggtcggaaggtgcgcccactgcagtatcctgttccgcctctggaagtcctgcaccaatgtttgtcccactcactgtgacctcctcctgtgtggagtctccccttgctcctccttccctgggtgtgattcaggctctagagctggccctgcctctcagccccccacatttctagaacacactgtagctgtgcctctacagactcccgctgcctggcctccacagatcctgctcagattcaccagtaggcaaagcttggccctattagctttttctctccatggctctgtggagatgtgcggagacccttacaggtcgggaggcggaagctgaggagtgggggctgggtggaaggtggacatcggggtttggtggaaatggggctctggggtttgcttccctctagtgtgggcaggggaccttgaagtgaagtcttgagaaaccagtagaatttgccactgtttccaggccttgtcaaccttttcattctttattttgctcctcatttcccatccctcacagtaactgtttaactgctcaattaaatgtgttgtaccgttcggtacttttactgaaacagtgaataaagcactgtgtgatttcctgaatgtttacatgtgcatcagttagcttgggctgctgtaacaaagtgccagagactgcggtgtggacggcagatgtgttctcacagcagtggaggctggaagttggaggtcagggtgcccctagggttgggttctggtgaggaccctcttcctggcttgcaggagacctactttttctgtgtcttcatgaggtagagaggggagagcaagccctctggtgtcttctccgggcagtcatctcatcatcacctcagccttatcaacaccccaccttgagaggctgggcttcaacagaggaactttgtggggatacagtttagtctgtggcaagggcttttttttataatctgtgtgataagattactcacactgatgtcctgagagtcaggtaacaaccactgacctgccgatttttatattttgtaattagttgccaattatttatttatttatttatttttgagacagagttttattcttgttgcccaggctggagtgcagtggtgagatctctgctcactgcaacctctgcctcccaggttcaatcaattcttctgcctcagcctcctgagtagctgggattacaggcatgcaccaccacacctggcacaagcctatagttttgtattttctatttttaagtagacatggggtttcactatattggtcaggctggtctcgaactcctgacctcaagtgataacacccacctcagcctcccaaagtactgggattacaggcgtgagccaccgcacctggcctgccaataatttaaaatcagacatcctccaacagtcttggtggccagcttcccttgcacactgggggctgtggtgtcccaaagccctgccctgtgaggaaggacagcagggctgagaagtgaatctccacgatgtcccacaccctgttgtgtgagtgtcttgagtttgcacagagccgacgtggcctcgttgggtgtgtgaccctggggcagttcactgaaccgccaggacccttgattttctttctttctttctttatttttttgagacagagtctcactgtgtcgcccaggctggagtgcagtggcacgatctcggtttactacaacctatgcctcctgggttcaagcgattctcctgcctcagcctcccacatagctgggactataggtgtgtgccaccatgcctggctaattttttttatttttctttttttgagacagaatttcgctctgtcgcccatgctggagtgcagtggtgcgatctctgctcactgcaagctccgctccctgggttcacaccattctcctgcctcagtctcccgagtagctggaactacaggtgcccaccaccatgcccggctaattttttctatttttttagtagagatggggtttcgttgggttggccgggatggtctcgagctcctgaccttgtcatctgccccccttggcctcccaaagtgctgggattacaggtgtgagccaatgcgcctggcctaatattttggtatttttagtgtagatggggtttcaccatgttagccagggtagtcttgatctcctgaccttgtgatctgcccgcctcagcctcccagagtgctgggattacaggcatgagccaccgtgcccggctggacccttgattttcttacctggggaatcggcataaagtgccgcttgctggttgcaggttgtaagcctcacgagagggtctgggtttggtttggtggtctgtataggcctgctgggatgtggcaggctaacagacctcaagtgctcttgccacctggctctgtgaccccattcacccccagaacatcgtgttctctcacacagatggcccaggaaaccttagtcccttccattccttcctcatcttcatggacagagctggcctcagtccctgttgtgactgtttgaggccctggtgtgctgggctcttctctcaggcttggcacgaccctctgggggagttccgtgtcacagagggtgccgctgaggccccgtcgggttggctcccggggctccactcccgggtgcggcgcggcctgcccttcccaacctgtttccttctgctccactcccgggtgtggcgcggcctgcccttccccacctgtttccttctgctccttcgcttctctgctccgtgggtttcgccgttgccttgccccctttctcgttgaactgccacctccttggattcagtttcaagtctgtggttatagtggcctggccaagaaagccccttccttgcttaaagaagggatgagcctgagccacagtttgtgctgggattggtgggtggcgtgcaaggcaccctccctttcctgacccctctttctgctgcattggcaggttcggagtgttcagtggacacacgcttggcagtgtaatttccacagatcctctgaagaggttcttcagtcataccctgactcagatactcactcacagccctgtgctgaaaggtaggcccagtgtggaggctgctcagttgctacccattttggggattgctgttgccttgttgccttggtaacgctgactggagatgccaggaattctaggacctcttttacgtctgtcttgaaccagagactgggtcctcagatgcctgagattgttactaaatatccttttacctgaaagcaacagatttttataagaaaattcagaattatgagtggacaaaataattgtcattaaaatagaaatatcttttttgtttgtttgtttgagtcagagtctcactcacttgcccatgctggagtgcagtggcgtgatctcagctcactgcaacctctgcctcccaggttcaagcaattctcgtgtctcagcctctcaagtagctgggactacaggcgccaaccaccacacccggttaattttttgtatttttagtagagactgggtttcaccatgttggccaggctggcctcgaactcctgaccttcggtgctccacctgccttggcttcccagagtgtcgaagtgttgggattacaggtgtgagccaccgcacccagcgtaaaatagaaatatctttattttatttatttatttatttatttatttatttatttatttattggagatggagtcttgctctgttgccaggttggagtacagtggcgtgatttgggctcactgcaacctccacctcccgggttcaaaccattctcctgcctcagcctccacagtagctgggattacgggcatgtgccaccatgcccggctaatttttgtatttttagtagagacgggctttcaccatgttggccaggctggtctcgaactcctaatctcaggtaatccgcccgtctcggcctcccaaaatactgggattacaggcgtgtgccgctgtgcccagccgctgtctagtcttttaaaacttggtgtttgagcatgcacattctccttctggaatacctgatcacccagcacaactcacgttatctttctgctggctacccttgccttgctgtgactgtgtcatggttctcagctagactcggtggcgtgtttgatggcccaggcatcgtctgcccagtgggtgtcctgttacccatgtatgacagactgtacccaagatatcagtcttacgaataaggccacgatgaacactttgagctttttctgtatctagcatatccccagggtagatgctcaggcaggaaactggtgggagatgagggatacacagatggctcccaacaggtgctgtgaggtgctcaggagtttatcatcacttgactgagctgagcttcctttgaacagcatccccaccatgattggtttattcccagtttatcttattttatgtatttatttatttttttgagacagagtcttactctgttgcccaggctggagtgtggtggtgcgatctcagctcactgcaacctctgccgcctgggttcaagctattccctgccaagcttgaattacaggcgcctgccaccatgcccagctactttttgtattttgagtagagacagggtttcaccatcttggccaggctggtctagaactcctgaccttgtgatccacccacttcggcctcccaaagtggtgggattacaggcgtgagccacctagcctgaccttactgacagtttaaaagcaggaaaattgaaatgcagttggtacattggaaaatatttattgtgaatatgacaaagcattacaagtaagtaaccgggcctgagaaacagaattgatgatatagcaaataggcaacaaacagggagatggtgaactttaataactgaaaaagtacatattaagatctgtcttcacactgaagctttgaaacacaactttttggccaggagcagtggctcacgcctgtaatcccagcattttgggaggctgagacgggcaggtcacgaggtcagaagttcgagaccagcctggccaaaagagtgaaaccccatctctactaaaaaatacaaaaattagccgggcgtggtggtgggcgcctgtagtcccagctactcgggaggctgaggcaggagaatcgcttgaacccgagaggcagagcttgcagtgagccgagattgtaccactgcactccagcctgggtgacagagtgagactcagcatcaaaaaaataaaaatacaaaaagtatctgggtatggtggcacacgcctgtggtcgcagctacttgggagactgaggcaggtggattgcttgagccagggaggtcgaggctgtggtgagcactgcactccagcctgggtgatagtgagaccctgtccaaaaacaaaacctgtgggcggcaagccacccaggcaccaaggcaagagaccgaggacacgagctgttctagtataataaaatataaaacaagaatagttataccagatatagatcttagatatgattacatatgaatatcattaatcattagttggtagtaattactgtttattgcaatattataataatcctcgctctataatcataacctaggaaaagccaggccatacagagacaggagctgaggggacatggtgagaagtgaccataagacaagagtgtgagccttctgttatgcccggacagggccaccagagggctccttggtctagcggtgacggcagcgtctgggaagacgcccgtcaccaagcggatcgtggtccagcggtagcaaaaggtgtcaaggaacaccactcactacttagaccgggaaagggactctccctttccccccgggagtttagagaagactctgctcctccacctcttgtggagggcctgacatcagtcaggctcacccacagttatccggaggcctaaccgtctccctgtgatgctgtgcttcagtggtcacgctcctagtccaccttcatgttccatcctgtacacctggctctgccttctagatagcagtagtaaattagtgaaagtactaaaagtctctgatatgcagaaataatggcataagctgtctttgtctctatctcctctccctctctgcctcggcttccaggcagggaagggccccctatccagtggacacgtgaccttacctatcattggagatgactcacactctttaccctgccccttttgctttgtatccaataaataacagcacaaccagacattcagggccactaccggtctccgcgcattgatggtagtggtcccccgggcccagctgtcttgtcttttatctctttgtcttgtatctttctttctacactctctcgtcgccgcacacggggagagacccaccgaccctgtggggctggtccttaacaaaaacccacaactttttgatctctgacttgaagtttttgtctgtttctccccctgcagcatctgatgctgttcagatgcagagagagtggagctttgcgcggacacaccctctgctcacctcactgtaccgcagggtgagtggatgtggtattatacctgcttctgagctcgtggcggggggattaagatctgcctagtacttgtcatgctgcctgccgtggacggcacatcgagaggttcagggatgtctggtgagatgtggctgtcctcatcaaggccaccactcaggtcaggagactgaacttgtcccttgggccgagcccctcctccttgagatagggagaattctctccaagcaggtgctggccactgtgaggggagagacgccacggtgtgagctgtcacagctccatgtgttacctttgcagtgggaagtgagggggctgcggtggccaccggctgggaggaaggtgaggggtcatctgtcgcacattggtttgcttggatattgaagggagcggatgcttttatttcagctctttgtgatgctgagtgcagaggagttggttggccatttgcaagaagttctggaaacgcaggaggttcactggcagagagtgctctcctttgtgtctgccctggttgtctgctttccagaagcgcagcagctgcttgaaggtgagcttttacgcgagcccggtggtgctggtcaagagtgtgtgtaggggggtgtcagcagagtcccagctgactgtgggtgagcctctcagtgaagcccttccctacctgcccggaacctgcagtgcctcctgtcgatggaacattctttgtcagacgcttccataagcactgactgctgctctgagaggccagagtgtccactgctgcttcattcaggtctctagtggtttgcacttgacatgctgtaattgctgtgtagtcttttaaaacttggtgtttgggtgtgcacagtctccttctggaatacttgatcacccagcataactcacgtcatgttcctgctggctgcccttgccttgctgtgactatgtcatggttcttaactagactgggtggcgcgtttgatggcccaggcattcgagagctgccagctggacagcatggtcactgcgttcctggttgtgcgccaggcagcactggagggcccctctgcgttcctgtcatatgcagactggttcaaggtaagtgacctgccaatcggctacctaatacctgatcttcccagaaggcctgggagtggggaccatgctgtccccacctgattctctgtcatgtgagtgagcaaccttgctgtcagctttgccgagtggccttggcagatcttcctctgcgtgtgccgaggagcctgggttctccctgtcggggcctcagcggatcttcctctgcatgttccgaggagcctgggttctccctgtcggggcctcagctccttcccctggtttctgtctcacttagttgacggagcctcctgctgtcttttataagaaaattagcgaaatcaagcctggacaccatagtgaaacctcatctccaccaaaaaaaaaaaaaaaaaaaaaaaaacacacacacacacacacaaaacaaaaactacgcaggtgtggtggcagacacctgtagtcctcgttactcgggaggctgagacgcaaggattacttgagcctgggagatcaaggctgcagtgagctgtgattgcaccactgtacgccagcctgggtgacagaaggagactccatcccaaaaagaaaaaaaagaaaatgagtgaaatcaggaaagaggggacacagaagtggatgctgctttttgcagagtatacaatgtctcttattttccctttttttttttttgagatggagtcttcctctgtcgcccaggctagagtgcagtggtacagaaagctcaccttctcggctcactgcaaactccgctgccccgtttcaagctattctcctgcctcagcctcctgagtagctgggattacaggtgtgcactaccatacccagttcatttttgtatttttagtagagacggggtttcaccatgttggtcaggctggtctctaactcctgacctcatgatccgcccgtcttgtcctcccaaagtgctgggattacaggcatgagccagcgcacctggcctttcctttttatttatttatttatttattttatttatttacttatttatttttttgaggtggagtctcattctatcactcatactggagtgcactggtgcgacctcggctcactgcaacctcctcctcctgggttcaagcaattctcctgcctccgcctcccgagtagctggggttacaggcgttcgccaccacacctggctaatttttagtagagacagggtttcatcatgttggtcaggctggtctcaaaatcctgaccttaagtggtccgcctccctcggcctcccaaagtgcagggattacaggcatgagccaccgtgcccagccttgcgtctctaattttcacgtaagtcctgaaacaagtacttcatttcttcagccgtatcacatattcttcctttttctttggaacacacacagtgtgctctctgacagaagtttatgcagctgttcctgaacctaagtgggcattagactcgcctggagggggctttggaaataaagatccagggcccatttgagactactgagtctgagctcctgagacctcagggatccctgggcaacccctgtgaaaacccccagttcatgtggggagttgggtgtatttgagatatcagctttgaaggaccgccatggtttctcttttagtgcttgtgagtaaagtttccatttgaagagctaatttttgtagaagttttgggttcgggccaggtacagtggctcatgcctgtaatctcagcagtttgggaggcctaggcaggaggattgcttgagcccaggggttcaagatcagcctgggcagcacagtgagaccccggtctctacagaatgtaacaattagctgggtgtggtggtaagcacctgtggtcctggctacttaccggctgaggcaggatgattacttaagccgaggaggttgaggctgcattgagctgggattgcattactacgctccagcctgggagacagagcaagactctgtctcaaaaaaaaaaaaaaaaaaaaaagtattgagttttcctgccatcaccacctcggtgaagtagttgcctctttgtaggagtctcagctccctgaaattttcaagggctgcggtgcctgcatcgccatcgtggctgcggtgcctgctccccccccaggccttctgaggagctgaggctgcacaggaggctgagccgcatctgcttgtgttgggagaaggtggtgactggtgcagtgtcagtgtcaactcacttctattccttaaagttccttctcacctgccctcaggctctccccagctctgcccagttagcctggggcttccactaaactaagaggagaggtgtttgttctgtccttttagtgaggcgctgagagatttgtgccagaatccacctggtgctcttgggtcaggagttgatgggtctccccgagccgcggctcaggtgtctccctgggctgctttttcttcggttccagaggcgacagttgggagaggaatactctgaagtgctgtgttggtggtggtgttttggttttgtttgcttttcttttaccttttcaaatcaactttatcaaaatatagtttaaatgaaataatgaaaggtatccaatttaagtgtaccattaaatgaggttttttgtttttttctgtttgtgttttcttttaagagactgagtgttgcccaggctggagtgcagtggcatgatcatagctcactgcagcctttacctcctggggtcaagcagtcctcctgcctccgcttccagagtaactgggactataggtgtgtgccaccacacccagctaattaaaaaaaatttttttgtaaatacaatgtcataccgtgttgctcaggctggtctcagattcctggcctcatgcgatccccgcaccttaacccccgaagtactggaattacaggcatgagccaccatgtccagatagttagatgagttttgataaatgtatatatgcatattcagtgtttgaacatctgtttttgttatgttttgttttgtttttgagatggagtccccgtctgtcaccaggctggagtgcaactcccacctcctgggttcaagcgattctcctgtttcagcctcctgagtagctgggactacaggtgcctgccaccacacctggctaatttttgtaattttggtagagatggggtctcaccatgttggccaggatggtctcgatctcttgagtttgtcatccgccccacttagcctcccaaagtgctgggattacaggcatgagccaacgcacttggcctgaacatctgttttaatttttacttttgagggcaaataccagcactgtgggaggacgaggtgggccgattgcttgagcccagtagttcaagaccaccctgggcaacgtggcaaaaccctatctctaccaaaaatacaaaatttagctggtatggtggcaggtgcctgtaatcccagctactcagaaggccgaggcaggagaattccttgaacccggaacgcgcaggttgcagtgagccaagatcagaccactgcactccagcctgggcaatggagcaagaccccgtctcaaaaaaaaaattttttttttttacttttaggaaatgttaatataagtagaccaaatgatcgtgaatttgagccctttggggtaattaatataattctcagcatatcacattatgtagttaaatgtaatttgtggggtttttttgtttgtttttttgaggcaaggtctctgttctgtctcccaggctgggatgtggtggtgtgatcatggctcactgcagtctcaaccttccaggctcaaatgatcctcccacctcaacttcccgagcagctgagtccgcaggtgtatgtcaccacacctggctaattattaaaaaattttttgtggacatagtgtctcactatgttgccctggctggtctttttgtttttttaagatggagttcgctcttgttgcccaggctggagtgcagtggtgcgaccttggctcacggtaaccacctcccgggttcacgccattctcctgccacagcctcctgagtagctgggactacaggcgcctgccaccacacacggctaattttttgtatttttagtagagacagggtttcaccgggttagccaggatggtctcgatctcctgaactcgtgatctgcccgcctcagcctcccaaagtgttgggatcacaggcgctagccaccgcgcccggccgtcctggctggtcttgacctcctgggctgaagtgatcttcctgcctcaacctcccaaagtgttggaattaccggattgagccactgcacccagccattaagtgtaattttttcaaaaatagcaaacagaactgccttttatctcagcaactctaacaatggctgctgtgaccccaggtctggcttgcgcgtgtcacttagatgctttacagaaatgcctttggcgacgggtctggactgttcctgctgcggccagtgatcatctggctcactgttaattgagtgaacgttgccaagagacaggagcagttgtgttgtggatggctgaatggagggtgataagacatggtgtgcttggcgggagaatttcaggttgaaactgggtgctgatgttttgagaagggaacccttgagtggtctcaggttttatttaaatttttaactgacaagtattgagctgctttcctggtatttggcacagacagttcatgtctctgagctttgtttttccgtgactctgtccctctcagagacatttgacaagcgttatcagcattttccgctttttatctaatggctttttgggtctgtctgcatgatgataacattcaaaagaatctacacatggtcaggtgtgatagttcatgcctgtaatcccagcactttggaaggccgaggcaggtggatcacttgaggtcaggagtttgagaccagcctggccaacatggcaaaacctcatctctactaaaaagacaaaaattagctaggtcagacgtggtggctcatgtctgtaatcccagcactttgggaggccaaggtatcacctgaggtcaggagttcaagagtagcctggccaacacgatgaaaccctgtctctactaaaaacacaaaattagccaggcatggtggtgcacacctgtaatcccagctactcaggaggctgaggcaggagaatcgtttgaacctgggaggcggaggttacggtaagccgagattacgccactgcgctccagcctgggtgacagagtgaggctttgtctcagaaaaaaggaaaaaaaaaaccgggcttggtggcacgtgcttgtagtcccagctacttgggaggcagaggtgggagaatcacttgaacccgggaggcagaggttgcagtgagccctgattgcaccgttgcactccagcctggatgacagagtgagactctctctctcaaaaaaaaaaaaaaaaaaatagctgggagtggtagcaaatgcctgtaatctcagctactagggaggcaggagaattgttcaaacctgggtgggcggacgttgcagtgagccaagatggcaccactgcactccagcctgggtgacagagcaagactctgtctccaaaaaaaaaaaaacaaaacacaattttgcacgctttcagaaagaccaaggtgagccttcagttcacgttggagttcaggtttcctgatagatggtaacttgctgaggtttcaccaggatgtcctgtggtctcaagtggggctagggtggcaggagctcgtctggttttgcaggtaagcggttcagtgttcacagaggcccacattctgtctgcaggttcactatgatgcgttcagggccatgcccatttaaaatctccttccttccctgactcactgcagcccccaggactttgctgcagcccccttcgttcctgggagggtttgctcatgttcctcgcttgctctgctagggtcttgcagcttcattgtctgaggggtggccctccttggcctgtgttccttacccacctctcttgcagtgatctgtccactggtggatgaggttagaagttaaagtgtgttcagaagtggcttcatcccacaaaatcaatttgtttgctgtgcacaaacacttcttagggcatttagcaaattgtacccctaaggatcccaaaaggatcccatagttagtgtttgttatagctaatgatttttaactgtttttcttcgaataacttttagatatctcttcagtcaaagcgcagtcgtgacatctgtaaatgtatgaaccacatgactttttggtgtttctcttttttcctttctgtttaggaggccgactacagcagccgcccggacactgcctaggtgggcttcacactcttctctccacacaggacactgcctaggtggtgcagctgcgcctggctgtcctgggcttcacgctcttctctccacacaggacactgcctaggtggtgcagccgcgcctggctgtcctgggcttcacgctcttctctccacacaggcctcctttgggagcacacgaggctaccatggctgcagcaagaaggccctggtcttcctgtttacgttcttgtcagaactcgtgccttttgagtctccccggtacctgcaggtgagaagctggctgccacatccatgatttctggtgcttcgctcacctgctgcatctgaggactgccttggcctccccaagagcctcctgcagatctgctctgagcctctcagccaggcccttccccttccccttccccttccccaagccgtttatggtgaaacaacacaaacattgcaactggaggtgtccacgtggacacacagtgagtgcgtgtgtgccagtcaaggcaactgctaagaaacccttttctcacctaggccaaggaggtgggtagatatattatgtcactgttcagtctccctcaaaacagtgagcaggtctgagtggtgacgtggagagacgttctcagcacccagttacgcaggaagagcgagttgtactgcagtgagggttttaggatctcatgtttgcttttttttttttttttttaatttcatgtgggttttttttttgtttttttgtttttttgggtttttttttttgagacagtctcactctgttgcctaggctagagtgcagtgttgccatcatagctcactgtagcctagacctcccaggtcaagcagttctcccacctcagcgtcctgagtagttgggactacaggcgcatgccagcaaacctggctgttttttctttttttcttttttttagtacagatggggtcttgctgtgttgcccaggctggccttgaactgagctcaagtgatccttccgccttggcctcccaaagttctgggattacaggtgtgagccactgtgcccagcctgaccctcatcttttaagaaaattggccgggcgtggtggctcacacctgtaacccagcacttttggaggctgaggagggcagatcacttgaggtcaggagttcgagaccagcctgaccaatgtggagaaaccccctgtctactgaaaatacaaaattagccgggcgtggtagcgcgcgcgtagtcctagctactcaggaggctgaggcaggagagttgcttgaacccgggaggcggaggttgcagtgagccgagactgcaccattgcactccagcctgggcaataagagcaaaactccctctcaaaagaaaaaaacacgctgtgtcccctctgtcccctttgaccaggaagtcaaaggcatggagctgcaggcggccggggccggttcctgctgccgctgctaggattgcacatccctggttcccccagtgagccgccctggacttgcaggaccagctacattagggtttcttgatttttcacctggggaagcagccttctattgtgttttttttttgttgtttttttttttggaaatgaagtctcactgtgtcacccaggctggagtgcagtggcgcgatctcggctcactgcaaggtccgcctcctgggttcccgccattctcctgcctcagtctcccgagtagctgggactactggtgcccaccaccgcgcccggctaatttttttgtatttttagtagagacagggtttcaccatgttagccaggatggtctccatctcctgacctcgtgatctgcccgcctcagcctcccaaagtgctgggattacaggtgtaagccgctgcgcccggcttgtgttttaattttactaatggtttgctttgcatactcataagtctgactgtaaagggctgtgtttctctactcagcactgtggatgttggaagtgaattgtggcctccctggagtcccaggcagttcccagactaacggtgctgcgctctgctatctatcctcaggtgcacattctccacccacccctggttcccggcaagtaccgctccctcctcacagactacatctcattggccaagacacggctggccgacctcaaggcaagctgtccctccatgcccactcctcacacctgtcccagcagaaactgctttgttttcttgttctcattctgtgtcttccctgaaggtttctatagaaaacatgggactctacgaggatttgtcatcagctggggacattactgaggtaatgttgcttgagccctgcagggtctcagccagtcacgcccaccatgcaaaggtccagtttcttttgactcttgagttgagtttttcagccttcccagtctcatgtctggtcttgcctcgggcgcagctgggggcgaggctctgcgggcctctgtgttgctgtgtcccaccttgtgtgtccccagcattggcagggaaagggttactgtgtggcagagtgaagtgcctcaggctgcaggacatttgtccttttgggagatcttggttcctgtggggttgaatggagaggtggttcgtcatgtttttctctgaatcacagaaaagtgttaactttttttttttttttggagatgcagtcttggtctgtcaccaggcttgagtgcagtggcgcaatctcggctcactgcaacctctgcctcctgggttcacgccattctcctgcctcagcctccagagtagctgggactacaggagccgccaccacgcctggctaatttttttgtatttttaatagagtcagggtttcgccatgttagccagaatggtctcaatctcctgaccttgtgatccgcccgccttggcctctcaaagtgctgggattacaggcgcccgccaccacgcctggctaattttttaattttttttagtagagacgaggtttcaccgtgttagccaggatgatctcgatctcttgacctcgtgatctgcccgccttggcctcccaaagtgctgggattataggtgtgagccactgctcctggccaagtgttaactgtttttatagcagccaaatgtcagatggtcatgtgatatgtgtgggtcactaatgaaaacattcttttttttttttgagatggagtctcgctctgtcgcccaggctggagtgcagtggcgcagtctcggctcactgcaagctctgcctcctgggttcacgccattctcctgcctcagcctcccgagtagcctatagtgggcctacagatgcctgccaccacgcctggctaattttttgtatatttttagtagagatgaggtttcaccacgttagccagtatggtctcgatctcctgacctcgtgatccgcccgtctcggcctctcaaagtgctgggattacaggcgtgagccaccatggccggcctaatgaaaacattctttactttttacttttttttttttttttgagacggagtctcgctctgtcgccctggctggagtgcagtggtgcgatctcagcttactgcaagctccgcctcccgggttcacaccattctcctgcctcagcctctccagtagctcagactacaggcacctgccaccacacccagctaatttttttgtatttttttagtagagatggggtttcaccatgttatccaggatggtctcaatctcctgacctcgtgatctgcccgccttggcctcccaaagtcctgggattacaggcatgagccactgtgcccagcgtattgtttttttttttttttttttttttggaatggagtctcgttctattgcccaggctggagtgcagtggcgcagtctcagctcactgcaagctccgccttccgggttcatgccattctcctgcctcagcctcccgagtagctgggactacaggcacccgccaccacgtcaggctaattttgtgtgtttttagtagagatggggtttcaccgtgttagccaggatggtctcggtctcctgacctcgtgatccgtctgcctcggtctctcaaagtgctgggattacaggcgtgagccactgcgcctggccctccattctttactttttaagacctttttattttaaagttacgagttactgaagaacacttataggtgacattaaagtgttaggtgaaaatatttaatataattttccatttataatttattgctgtttataaattactttttttttttttttgaggtgggatgttgttctgttgaccaggctgaagtatagtaccgtgatcacagttcagtgcagcctcaaactcctaggttgaaacgatcttctcaccttgacctcctgagtaactgggagtacaagtgtgcgccaccatgcctggctggtttctaaaattttttgcagacatagggtctccctgtgtggccgagactggtcttaaactcctgggctcaagtgatccttccgccttggccccccaaaatgctgggattacagatgtgagctgccgcgcctggcctcagaatgtttttttttttttttgatgcagggacttcccctgttgcccaggctgcagtagggtagcatgatgatggcttactggagccatgatttcctgggcacaggcaatccttccacctccacgtcctgagtagctgggaccactggctcatgcctctacacctggctaatgtttttgtatttttttagagatgagatgtcatcatgttgcccaggccgggcttgaactccttgggcttaagcagtctgccccgcttagcctctcaaagcactgcgtttatagacatgagtcatggcacccagccctcgtaatttcttttaatctcaaaaattaagtctctactccttcccacctagaaatctttactttcaactctttcctggaggcaggaaagaggctcacggcaggctctcagcagagctgagctctcgaggagggccgcacatcacggggtctgaaccttgtgtgtgtggaggtggcagtgtcatcctcccctgtcgtgctggtattttgggacattttggagtgctccagggcccctgctgtgcgcacagcatgtgggcctttacctttaatgtgtacagagcctttcaacaaggaagcacaggttgagtgtggccttcactgctcagtcttttctttaaagtcctctgttctttttcctttcctccctgtatgggaaccagccccacagccaagctcttcaggatgttgaaaaggccatcatggtgtttgagcatacggggaacatcccagtcaccgtcatggaggccaggtaggctgggctgccgaaaaggcctctagcagctgcagtgtgtgcagaccgcgctctgatgcctgcagtatgtgcagactctgctctgatgcctgcagggtgtgcagactccgctctgatgcctgccagcgtctggggctctttggagtgtgtcccatttctgcccagagccacatggggcaggttggccactgtctattcagagagagacaggagtcagggctgtgaatcgaggatcctgccgttaagggatacggggtgaggtcaagagctgtgcatttgctgtgaaacattttttcctctgtaaaagcaggtgatgcccctcccgtgctgaagcagccaacaggaactgctgattggggagcttgcactgggagggaaggcagtggggccatgatgtttttttttttatcaatgccttctttgtgaccaatatggagtcagtaacagagagctgaatagcacagctttattgaatttggtatgatctcaaaacatcttgaattctggtggttacacatgtggatgagctgattgcagctcccagggttttgaaatttagctccaaggaaattgccccaaatggaccttacatggtcctcgtggcctcagattgatccaggctccacgttcaagcccagggagcaggccgaatgtggtcctgattcccacggactcagggctgggctagcacggcctgccctacacatgccttgtcccggaactgtgcacaagaagacttcataatgcatcgtggctttggagtgagccctcgcagtccactctctgaaacaccggtcaccgtctgtgggaattgccttctcgctgctctgactgatgcactgtctgcttctctgtgttgcagcatattcaggaggccttactacgtgtcccacttcctccccgccctgctcacacctcgagtggtcagtatgcgtctccatgagtttgtgaccagttgtgtagaaagcaaggactttccttgtcagtctctcacaggtctcttctcttcccacagctccccaaagtccctgactcccgtgtggcgtttatagagtctctgaagaggtatgcagcaacggttagaaggggatgactacttccaggtttcttctgacaatgcgaagaattgtggatcttctgtagagaaatttgttagaccactattgtgttttattggtaaaatattggctccaaaattggttggttacttttttttttttttttttttttttttttttagttggagtctcactctgtcacccaggcttggagtgcagaggcgagatcttggctcactgcaacctccacatcttaggttcaagcgattctcttgcttcagcctcctgagtagctgggattacaagcctgtgcctggctaagtttttttttttttttttttttagatggagtctcgctctgttgcccaggctggagtgcaattgcacaatcttggctcactgcaagctctgcctcctgggttggagcaattgtcctgcctcagcctcctgagtagctgggattataggtatgcaccaccacgccctgctaatttttgtatttttagtacagacagggttttgccatattggccaggcggttctcaaactcctgagctcagaagatgatctacccacctcatcctcacagagtgctgggattacagatgtgagccaccgctcctggcctttttttttttttttttttgagatgaagtctcactctgttgcccaggctggagtgcagtggtgcgatcttggctcactgcaccctccacctcctgggttcaaggaattctcctgcctcagcctcctgagtagctgggattacaggcgcgcaccaccacgcccggctaatttttgtatttttagtagagacggggtttcaccatgttagtcaggctggtcttgaactcctgggctcaagcgatctgcccacctcggcctcccaaagtgctgggattataggcgtgagctaccgcacccggctgcatcattcttcagtgaaagaaaatgtttcagtacataatgattgtgcagagaggagaactgaaggaaaatgaaagagctctgggaaagcctcatgctgcagaacttgagagtagacctggaagttattgtttagaataataaggtatccttggatcacttacattgcaggtttctagtaagaaagttggttggtatcaaccaactttggaagaaataggaaagtataagtcctatattccagcaaaatttataaagttctgggacctgtaagaagataaacacaaagagccttttttttttctttttttgtatttttagtagagacagggtttcactatgttggccagactggtctcaaactcctgatcttgtgatccacccacctcggcctcccaaagtgctgggattacaagcgtgagccaccatgctctgcaaaaataattttttaaatcttaaaataagtttattctctgggatccttactttcatttgttttgagacagggtcccactctgtcacccaggctggaatgcagcggtgcagtcatggcttactacagccttgacctcctgggcttcaacagtccttccctctccgcctcccaagtagctgggtctagaggcgtgctccaccacacccagccagccttgatctcctgggcttcaacaatccttccccctccgcctcccaagtagcagggtctagaggcgcgatccaccacacctggccagccttgacctcctgggtttcaacaatccttccccctctgcctcccaagtagctgggtctagaggcgcgctccaccacacccagccattttgtaaatgctttgaggacacggattttcgctgtgttgcccaggcttctctctctcttggcctcaaataatcctcctgcttcaacttcccaaagtgctgggattacaaatatgagccactgtacctggcttaccctttatcatgttaagaaagttccctcttactaatttgctaaggatttttagcatgaactaatgcgttttatttttttttctttaatttattttttgagtcggagtctcggtttgtcagccagtctgcagtgcagtggcgcaatctcggctcactgcaagctccaccttctgggttcatgccattctcccacctcagcctaccaagtagctgagactgcaggcgcccgccaccacgcccggctaattttgtttttgtatttttagtagacacagggtttcactgtgttagccaggatggtctcaatctcctgacctcctgatctgcctgcctcggcctcccaaagtgctgggattacaggcgggatccaccgcgcctggcccaattttgcatatttttaatgacacgaactaaacgtttttcttagtattaatcattaaaattaacaaagattcatgttttgctgggcgtggtggctcacgcctgtaatcccagcactttgggaggctgaggcaggtgaatcacaaggtcacgagttcgaggccagcctggtgaacatggtgaaactccgtctctactaaaaatacaaaaaattagctgggcctggtggcaggcgcctgtaatcccacctactcgggagggtgaggcaggagaattgcttgaacctgggaggcggaggttgcagtgagccgagatcgcaccactgcactccagtgtgggtgatagtgggagactctgtctcaaaaaaaaaaaaaaaaaaaaaaaaaagaaaaacaaagattcgtgttttgaatttggaaattaccaaaaattgtatgagagaaatagaaataatttataatttcactgcccagggataatcactggtggtattttgtggtctagctccttagatattaatatatgattaatatgatatattttgaaacagtgctttttaaatctatatatattttttaatatttttttgtaaaaacaggctcatactgtacacagtatttataatttatttaaatttaatatgtttttattttataatagatttggggattgtaatcttgaattaatttaagccatagctgacttaattgtattgttttcctgtgatccagagcagataaaatccccccatctctgtactccacctactgccaggcctgctctgctgctgaagagaagccagaaggtaagttcctgggccgcttgtccactctgggacttgtgcttttccattttcctaaccttgagtgtctgttgtgctacaccacccgagtgagctcgggggtggctgtgccagctcaagccggtgctttgggtacagggtccgcccaccatgctgacgcccagtgccagctgtggcacagactcttacctgggggtcctgaagaatcacttagcaccttccggaaaggagtgtgtgcagtgcacagccccactttgtcactcgtcatcttcctgtgggccgcactgaggtgtttgtacaggcttcagactcgggtgctctctcagcggccaccttggggcccacagcgctggctcgagcctgtcgtagggagtgtcatgcagcacttttctgttgcacagtgcaggtaggagtagaagtcaggctcttttggcctgtggggagcagtggtgcagctgtcggtcagacctacgccctcattgggaatccgtgaaaggctgcactcaggcagcagtgggagatgccatcatgaggctggtttttcttgaagtgtgtggctttatctccagtagaagccagcatctccctgtgggagccgctatgagctgaagacatagatctgaggctgctgcttccctgtgggctttttttttttgagacagagtctcgctctgtggctgtggactgcagtggcgcgattttggctcgctgaaacctctgccccctgggttcaagcagttctcctgcctcagcctctgtaatagctgggattataggcacgcactactacgccttgctagtttttgtatttttagtagagatggggtttcgccatgttggacaagctggtctcgaactcctgacctcaactgatccgcctgcctcggcctttcaaagtgctgggattacaggcatgagcaaccgtacccagccccttgtgtgctcttctagatccccttccacctgcagggccagggaggctcgttgagatttttttttttttttttttttttttgagacagagtctcgctctgttgcccaggctggagtgcagtggcgcaatctcagctcgctgtaagctccgcctcccaggttcatgccattctcctgcctcagcctcccgagtggctgggactacaggcgcccgccaccacacccggctaattttttgtgtttttagtagagacagggtttcaccgtgttagccagaatggtctcaatctcctgacctcgtgatccacccgcctcggcctcccacagtgctgggattacaggtgggagcccccatgcccggccgacccaccctgagagcatgacctctcagttgtgctggggatgccacaggggcctcagggctgtgtaccctgcggtgtgaggcgtttgcttctcttgagaggtgtcctccttcccccaggatcctccttcccctggggtccacttgttcgtagcttttggtggcttccagaatggtttctaatcatttgtctgatgaggcttatgcacagactcctagagcctatgatttctagagcctgtgatttctggtttcattttggctgtggctgtgcatagcagtgcattttcatgcttgtgtcttctccagcaaccccagaacttgaaggttttttactttaaaaacatatgcagcgtatcttcctttttatattgaaagtggtggctgggcgcagtggctcatgcccgtaatcccagcactttgagaggccaaggcgggcaaatcatgaggtcaggagatcgagaccatcttggccaacgtggtgaaatcccgtctctactaaaaatacaaaaaattagctggatgtggtggtgcgtgcctgtagtcccagctactcgggaggctgaggcaggatgatttgaacccgggaggcggaggttacagtgagccgagatcgcaccactgcactccagcgtggtgacagagcaagagtccatctcaaaaaaaaaaaaaaaaaagtttgaggaaccaggggactaaatggtcacctatccgtgatcctgtccccaccctcgccagccctcgatcctccttgttttcttccgtgtgtatgcttctcacggtggtggagtggtattgatggtgcacacagaaccgctttttttcttaaacttgtttataaatgtaattttttatgaaactcgtttataattgtaattttcgatgtggcatccagcatcagggaagacacctcatttacctcctcagagactcccagtccctccgtctgccacacacagcagcttggaagttcacagctctgtatttgactgtgtgaagtttctatttttgcagtgaagagtcctgttgagtgtctttccatctggtttcttccttcttctcacagatgcagccctgggagtgagggcagaacccaactctgctgaggagcccctgggacagctcacagctgcactgggagagctgagagcctccatgacagaccccagccagcgtgatggtgaggatggatgggagctcatgctgtgtctcatgtgtgcagcctgtggttggagctctgtggctgggccattttccccatagtgacatcaggctggtgtgtcttcctagtagtccagtagtttaaagattgaccccgggctggcgggtgtggaaccttttttgagacaaggtggaaggctagtcctactgaagctgtcacagacccttggcagaaggtgaatattcggctagttgcatctgagtaggacgaatgatgatagagaagaaaacgcgtgactaggatgcctgttttcccgctcatcctgcctgccggagtcgatgtcacatcagacacacagggtctctgccctgtgatcctgcttccatgtgatggttttctgtaaaatccagagtaagaaatgttcatctgtggattgagaacatgcagtttcttttttcttttttttttttgagacagagtctcactctgtcccccaggctggagtgcagtggcgccatctcggctcactgcaacctccgcctcctgggttcaagcaattctcccgcctcagcctcccaagttgctaggattacaggtgactgcctccatgtctggctaattttttgtattttttagtagagatggggtttcaccatgttggccaggctggttttgaaatcctgacctcaggtgatccacctgtgttggcctcccaaagtgctgggatttcagtgtgagccaccgtgcctggcctacatggaggtgatatatatatatttttttgagacggagtcttgctctgtcacccaggctggagtgcagtggcgtgatctcagctcactgcaagctccgcatggaggcaatgttaacacagcttggttagcgctagctggggctgcagcgccttggcggtcttcactcagaccaagtgcgccagttcctgagtgcagccttccggtgattcaatgatggcttgtgcagaatgtggtacatgggggacatggaggaaaagttccagtgcttaagcaagaggttgatacatgtcaggtgagtcctgtttctaaaagcaaagcggttttcacctttaaatgatgtagttgggctatgtgtggcccatttccctgggccaacatggaacctctggcatgcgcttaggcagatgtggtgtctggagggctggcatgggatttcagatggggaggttcatgttggtgaatgaacatgtccccctctcagccaatcaggaaaaggtagtggatggcgtctggccccatttgccatgacacatgctgcaccacaaggctgcaaatcctgcggggcgaacaaacactggtgttcagcacctggctgggggatgtgtgcagtcagcaggatccgtggaatcgtacttgacgggaggcggagctctctaggccgcagctgtatccctcctttcggggttcttgtcatccctaactagtttcttccttcgcagttatatcggcacaggtggcagtgatttctgaaagactgagggctgtcctgggccacaatgaggatgacagcagcgttgagatatcaaagattcagctcagcatcaacacgccgagactggagccacgggaacacatggtaggtgtaggggctcagaacaaagcagggggtcttcaccattttccattaggcagaggcattagacgcatggagccttctctcaatttctgtttgacttgctcagttagtgtcgtatcagatgttccagggccaggcagcggtgtaccagggtcagctgccacagtctgtttgtgtatgaagagctccttttacattttatttatttatttaattttggagacagggtcttgctttgttgcccaggctggagtgcagtggtgcaatcatggctcactacagctttgacatcctgggctcaagtgatcctcttgtctcagcctcccgagtagctgggactacaggcgtgcatcaccacacccggctaatttctgcattttttgtacagttggggtttctctgtgttgcctcgactggtctagaagtcctgaggtcaagtgatctgtctgcctcagcctcccaaagtgttgggattataggcataagccacggcacttggcctctttttttttttttttttttgactgagtcttctctgttgcccaggctggagtggacgatcttggctcactgcagcctccacctcctgggttcaagcagttctcttgcctcagcttcctgggtagctgggattacaggtgcacaccactacgcccagctaatttttgtatttttagtaaagacagggtttcatcatgttgaccaggttgggctcgactgcctctttagaatatgcgacagaggctgtttctggccccaaaacctaaaatatttttctggccccttacacacaaggtttgccagtcccgcctgctgctgtagaattttgtgattggcgattacttgagggctgctattcccaagattggggaatgggggccctgggcaccagtttgcattgtaacatgccctccaaacaagcctgttttggaggtctttttgcaaagcagaattgcgatgtctgtggcgggagcgctggccggcttccttcctgctgctcccgtccccaggacaccacgctcatgagaactgtgtctctgcaggctgtggacctcctgctgacgtctttctgtcagaacctgatggctgcctccagtgtcgctcccccggagaggtgaaggcgcgggcagctccctgagtggtggggctcctctgggtgccacctcttgctgggccaagtctgcagaccagggactcatgagctcgtctccgcaggagcatgcggcgatgctgagtttcatcaaataggacgcagcagaagttgggaagcactgcagaagatgggttgtcttccagaaagaccactgttttggggaacagcttggctctttcttcggccgctggtggttggattagctgttggagggatgtgcaggactgaatggctagtactgatggtttcacggctgtctctgcaggcagggtccctgggctgccctcttcgtgaggaccatgtgtggacgtgtgctccctgcagtgctcacccggctctgccagctgctccgtcaccaggtgaggctctccttcatgggggccacccttgggggcccactctgagggccaggctgctacttctcaattcgtcttcagtgccctggaaaattccagcttggaagagggcagtctgctctgccaccctcattctcgttgcagggcccgagcctgagtgccccacatgtgctggggttggctgccctggccgtgcacctgggtgagtccaggtctgcgctcccagaggtggatgtgggtcctcctgcacctggtgctggccttcctgtccctgcgctctttgacagcctcctgacctgtaggacgagggattccttgttcttctgcctgaagtgagctcttcttccacagtcgcgtcttctctcctctctctcgaaaagtgacacatgctcgtttgataaaattagaagagacagacatgcagacataccacccaaagataaccactttttagcattttggtatatatccttccagaattttatctgtcatttgtttataatatgcgtgcgtttgtttctttgttcataaaaatgagatcatattatactaaactgctgaaattaatagtagatagtaactgtctatatcgttaagcattctttgatgtcctggtgagagctgctttgttttgtcttggtcccttgtctggcccttggttggaccagctccctctggtcaggttcttcggcaccccatggtgagtagcttcccagtgtgtacacctcgggctgtttctctagggctcagcagatggggccatgtgctgaggtgaggaaggaccctgtggttaagaatggtctgctcagtgcctcaagggctccctgcagctgccacgcacaggcagaagccaggacagaatcccttcagctgccactcagaggcggaagccaggacagagggctgggagactctggtgggagttgctggctggggcttggcttgtagcttctggtctcttgggcagaggtagcccaggtcgggacagagccctgttgcggtgccggagaccctgtgcgggaaaggggagatctgacattatgacagggtctgaataacagagaacttagaagaggcgcaagaaatgtacgtggagcaaggagagggagtcagatggcagctgtgcggatcccacacctcagacatgggcctcggggagcaggcactcggtactccggggatacagagtccctcctaggcgcttggccacaccagacagtccccactcaccccaggccccaaacactgagtactgggtgttggcatgagaggcacacagccaatggagaagttgggagctggtgaggagggaggcatccaggtggcttgggggagacagggccatcctctcttagaaacacagagatgcctcaggatatatatccaggtgaagaaagcaaaatactgaactcggtctcagatgctactttttgcataagaaagggagaatgaaatatatatttggtgtgtgttttgtttttttttttgttttttggtttttggtttttgttttgagacagagtctcactctatcgtccaggctggagtgcagtagcgtgatcttggctcactgtaacctccgcctcccgggttcaagcagttcttgtgcctcagcttcctgagtagctgagactacaggtgtgcaccaccatgcccagctaatttatgtatttttagtagagatggggttttgccatgttggccaggctggtcttgaactcctgacctcaagtgatctgcccacttcagttaggattacaggtgtgagcctccacgcccagctcaaatatgtattagtaaaacagaagtattagaactgtaagaacaccatgacagtgctttgacatctccattgcctcatggaatctcattctgagcttccttggttacaagtgagaatttttcacatgggtattgctgtaggtatgtatgttgagtaaatgacacaggtctcactgtgtcccccaggctgaagtgatcttcccacctcagcctcccagtagctgagaccacaggtgcacacccacacacccagctagtgagagatggggtctcactgtgttgcccaagctggtcttgaacttctgggtttaagtgatcccctgagctgtgattgtgcgactgcactccagcctgggcatcagagtaaggccctgtataaaacaaaaaataaaccgagggctgggccaggcacggtggctaacgctgtaatcccagcactttgagtggctgaggtgggcagatcacttgaggtcagcagttcgagaccagcctgtccaacatggggaaaccccgtctctactaaaaaaaattaaaaactcgactggttgcagtgactcatgcctgtaagcccagcattttgggaggctgaggtgggcggagcacgaagtcaggagatcgagaccatcctcgctaacacggtgaaaccccatctctactaaaaatacaaaaaattagctgggcatggaggctggcacctgtagtcccagctactcgggagactgaggcaggagaattgcttgaacctgggaggtggagggtgcagtgagccgaaatcgcaccactctactccggcttggcaacagagcaagactccctctcaaaaaaaaagcactaacaacaactacaacagaatcagctgggcatggtgggagatgcctgtaatcccagctacctgggaggctgaggcaggagactcgcttgaacccgggaggcagagattgcagtgagcccaggtggtgccactgcactccagcctgggcggcagagcaagactgtctcacaacaaacgaaccaaaaaacgaaggaccaatgctcaggccatccagttcggaatgcactaaattcagttttatgaaattcaaagtaactttttccttcatcccttattttgtatggattacatttatatgttataatttctgttttcagattttgtacagcagcaatttcttactctctctgcaagttttcttcccagtcacgagatactttgtgcagctgcttatctccaggccttattaaaaaggtaggttcactcttttcctatttttccattctgccatacgtttcaggtttacgcagctttcggaccggaaggccgaggtctgctgccgctttgtgcccatctcaggggcagctcctgggtcaggctggctgtcatggggcagctcctgagtcaggctggctgtcatggccacctctgctgtctgcttaggcagcctgactgctgagtgctgcctttccttgtgttctctgagtgtaaagtgaagttgtatgaagacaactacaagtctgtaattgtaatgaaatagatgttggcatttataggatagatgaattaaaagatcagtattcataataagtatctttccctggaaagaagaattcttattcctctcatctagtaaatgttccttacattgttcagacaaaggaatttttttttttttttgagatggagtcttgctctgtcgcccaggctggagtgcagtggtgcgatctcggcccactgcaacctccacctcccgggttcaggcagttctcctgccttagcttcccaagttgctgggattacaggcacgtgccaccatacccggctaattgttttgtatgttttttagtagagatagggtttcaccatgttggccaggctgttttcgaactcctgacctcaagtgatccacccgccttggcctcccaaagtgctgggattacaggcgtgagccgctggtgcccggcccagacaaaggaatttaaagatgagcattggaaaccctgaatgtcaaaagtaaaggtgaaatggcactgcaaaccagtgttgtccttttataggattttaatgaacgtctcgtgtataaaatagtggttttcaggctgggcgtggtggctcatgcctgtaatcccaacactttgggaggccgaggcgggcagatcatgaggtcaagagatcgagaccagcctggccaacatggtgaaacctggtctctactaaaaatacaaaaattagccaggcgtggtggcgcacgcctgtaatcccagctacttgggaggctgaggcaggagaatcgcttgaaccagggaggcaaaggttgcagtgagccgagactgcaccactgcactccagcctgggcaacagagcgagactccacctcaaaaaaaaaaaaaaataaataaataatggttttcaacttcaggcttcacattagaatcaactgagaagcttttgaaactatagattcctggcccctttccagataaattaagtcagaatctgggagcagcccctgaggatccagggtgcacgtatttccagttatttcctctgaggaactttgtccctggtgccaagtttttaaagaaaacatggagtttgagcttaggagagggcagcgtggttcccacccagcatgctgagcagggacgacagtccttggagcaggctggttataaacatgggaggctctcatctcctcgggggcagagatggacacggtcacgcagcaccaatagtgtgtctggcttgtccagttggtgtgcatttttggtgggaacgccattcctggcagaggcctagagatgggctgtttcactgcccgggaccaaaccagccctacccctgggaggcagttttgttcctgcaattctgcttccagacatttagctcaaggaagcagtcagatggcaggaaggtctgcacataggctcttccctggagcactgtgcacagccatgatcgctgaggggctctgcacccttccaggggctggactgaggtcccctgaacgtggggttgtgtgttgtgccctcccaggggctggactgaggtcccctgaacgtggggttgtgtgttgtgccctcccaagggctggactgaggtcccctaaacgtggggttgtgtgttgtgccctcccaggggctggactgaggtcccctgaacgtggggtcgtgtattgcgccctcccaggggctggactgaggtcctctgaatgtggggttgtgtgtgtgggctgttgatggtctgtttccacctgagcatttgctcagccactcacagtgaaacttgcgcaatgaagaaacggccgggtcactctctgtttcagtttcagttcctcatgttcagattgttctcagaggcccgacagcctctttctgaggaggacgtagccagcctttcctggagacccttgcaccttccttctgcagactggcagagagctgccctctctctctggacacacagaaccttccgagaggtgttgaaagaggaagatgttcacgtaggtgaccgttccttctcctgcatcatgccacgtcctgagtctagggtttgtgtgtgctcctcgggcaagaacagcagcacgtaggtgaccgttccttcccctgcatcatgccacgtcccgagtctagggtgtgtgtgtgccgactgtctcctcgtctcgagtctagggtgcgtgtgccgactgtctcctcagaggcaagaacagcagcacttagatggtttgattggaatcttgactaaaatcgttgtggcctcatgtgcagctcttaagaaattatacagatactgggcacggtgctcacacctgtgatcccagcactgtgggaggccaaggcgggttgatcacctgaactcaggagttcaagaccagcccgggcaacatagtgaaaccccatctctacaaagaatgcaaaaattagctgggcacagttgtgtgcacctttggttccagctacttgggaggctgaggcaagagaaatcacttgagcccaggaggtggaggttgcagtgagccaagatcacgccactctattccagccaggatgacacagcaagaccctgtctcaaaaaaatatattaataaatacagagaaaccctgctatactttctcagtttctcccaacacgaacttctttttttatttttactgatatattttttgagacaacgtctcgctgtgctcagtggtgcagtcttggctcactgcagcctctgcctcctgggttcaagcaattctcatgcctcagcctctccagtagctgggactacaggcgcctgccaccacgcccgactaattttggtatctttagtacagacggggtttcaccatgttgtccaggctggtcttaaactcctggcctcaaattacccacacgccttggcctcccaaaatgctggaattacaggcgtgagccattgcgcccgagaacttgttttttgttgttgttgttgttttgttttttttttctggtggagtcttactctggggcacagtggcgcaatcttggctcactgcagcctctgcctctctggttcaagtgattctcctgcctcagcctcccaagtagctgggactacaggcgcgcaccaccacgcctggctaagttttgtatttttagtagagatggggtttcaccatgttaggctggtctcgacctcctgacctcgtgatctgcccgccttggcctcccaaagtgctgggattacaggtgtgagccactgcgctcggcccctgggaacttgttttaaacatgtctgccaggctgtgtggtggtcactcagggtctctgggctcacccatgtgtgcctggttactggagctggcattgctctcaccagtgtgccttggtactgatttatttctgaggatgtttgcctggttgttttggtctttagaaaagaatttcaaggtggctgggcacagtggctcatgcctataatcccagcactttgggaggctgagatgtcaggagattgagaccatcctgggtaacacgatgaagccccatctctactaaaaataggaaaaagtgatccttctgctttggcctgccaatatgttgagattgcaagtgtgagccactgtgccaagccttttgtgaaattattttattatttttaaattattatttttttttttggagatggaatcttcctctgttgcccaggctggagtgcagtggcacaatcttgggtcactgcaacctcagccttctgggttcaagggattctcctgactcggcctcccaagtagctgggaccacaggtgcacgccaccgcgcccagctaactttttgtatttttagtagagatggggtttcactgtgttagccaggatggtctcaatctcctgacctcatcatcctcccgcctcggcctcccaaagtgctgggattacaggtgtgagccaccacgcccaaccctttttttttttttttttcgtatttttagtagaaacagggtttcaccgtgttagctaggatggtctcaatctgctgacctcgtgatctgcctgcctcggcctcccaaagtgctgggattacaggcatgagccaccgtgctcggcctcctaaaaatgtttttaaaaaacttagctggtcatggtgatgtgcacctgcagtcccagccatctgagaggctgagggggagaattctggagttcaggaggcagagtctgcagcgagctacgattgcaccactgcacacactccagcctgggcaacagaacctgtttccaaaaataaatgaaggtatgctactgtgaatagctgtagaatgttgttgttttgttagtttcttttttcttttttttttttttcctttttatagatagttctcactctgttactcactgcagccttgacctcctgggctcaagagatcctcctgcctcagcctcccaagaggctgggaccacacacatgtgccaccacacctggctgatttttaaatcttttgtagagacggggtgtcaccatgttgcctaggctggtgtcaaactcctaggctcaagcaatctgctggcctcagcctcccaaagtgctgggattacaggcatgagccaccgtgcccaggtaatttttaaatgagatgaggtcttactatgttgcccagactaaaatagccgttttatacttagaaagaaggattacagtactaacatctttgtgctagggaaatcctgtaagaaatcattcttgataaaactaaggtttctttcctgtggaactctcagctgcaatttcattataacacagggacatggaggactgcgtatgagatgaaatgacaaactggtttataaacctgtcggtggattgtgtgttctgtcctcattgtattgaattgcttgctctctttctcagttaacttaccaagactggttacacctggagctggaaattcaacctgaagctgatgctctttcagatactgaacggtaagtgttgaaaagagctaccctggccaggcatgatggctcacacctataatcccagcactttgggaggctgaggcaggagatctcttgaatccaggagtttgaggtcagcctgggcaacatggggaaactccatttctacaaaaaatagaaaagaaattagccggacatgcggcacgttccagtcatcacagccacttgggaagctgagcaggagcattgcttgagcctgggaggtagaggctgcagcgagctgagatcacaccactgcactttagcctgtgcaacggagtgagaccctatctcaaaagaaaaaggagcttccctttaaaatgttacacggttttccacattgccttaaagcctatgtttcgtcattttatcctcaatttaatgtttggtttacctgttaatctttgagcacaatttcaattttttttttttcggtggcaagatttattaaagcaaaagcgaaagtaaagcttccacgcggtggcaatttctgtttttctttttttttttttttttctgagacagagtcttgctctgtcacccaggctggaatgcagtggcgcgatctcggctcactgcaacctccacctcccgggttcacgccattctcctggctcagcctcccgagtagctgggactacaggcgcccgccaccatacccagctaattttttgtatttttggtagagacggggtttcaccgtgttaaccagggtggtctcaatctcctgacctcgtgatccacttgccttggcctcccaaagtgctggcattacaggcgtgagccaccgcgcctggccaggttgcccaatttcggttgttattcctttatttaagaaacatttactgagctcctaccatgtggcagacaattctagagtgttctagaagcagggagtatagaggggaataaacaagcctgcccatatggcacctttgtatcaatgagggcagatgtggcacgtataaggcacccacttagacttcaccctaccctggctgggctatggctgctgtccgggagctgtacacctgtgtccaggccctggcaacacacaggtagatacagaagtggattaaaggtaggaatgagccctggagataacagacagggccgtgtgagaggaaatgaccaggcaggagcagaggctggtgtggagcaggtggtgcagactttgaggagtgatgccagccttgacttgggggcaccaagaagtgggtaaatgaagcagtgaacccccatgagtcccagggctgatgactgagaccatttgagactatttgagaggccagatgtgctgttctgggcataggagtagggagcccagaggaccgttgggtttaagggtgtggagtttagggtggaggtcagggagaggggaatgtggtcactgcagatatggagtatcctggtgggtatatgggcctcagggtgcctgccacacctagactcaggagagggttggcaacagccaccctgtgctcctcgtccttccggccatcaggggccttccaggcacatgcagcactgtcgcctgcacctggatcctggtatcagattctggatgaaaccaatggaagtaataggaaaaggaaaacataggggccacaaaaagaaaactcgctgctgcctgcggcaaaacacgtgctgatggttcaggtcgtgccaagcccgctctgcaggcgcttccttcactcacccccgtttctcctcccggctgctctctggggtggagtctaaggaggaggtcagagggaggggcttgtctgctgcatgaggtcatgctgcatcaggtcaccgctgcgtggaagttgtgttgagatgtgttgcgggattttctttcttttctgaattacttaagtgatacttagatacattctgtgccagttccagacagtgtgggtggagcaccccagttccggacagcgtgggtggagcaccccggtcccggacagcgtgggtggagcaccccggtcccgcacagcgtgggtggagcacccaggtcccgcacagcgtgggtggagcaccccagtcccggacagtgtgaggagagcacacactccctagcactcacatttgcagggtcgtgtggagcgttttcctggttgtggctctttctgcataaatggattgcggtattgatggttctgtgcactgcggatttgtttgtttgtttgagacagggtctcactctgttggccaggatggagtacagtgatgcactcacggctcacggcagcttccctctccagagctcgagtgatcctcctgcctcagcctcctgagtagctgggaccacaggtgggcactactatgcccagctaatttttttattttttgtaggaatggggtctccctttgttgctcaggctgatgtcagactcctgggctcaagtgatcctcccaccttggcctcccacagtgctgggattacaggtgtagccactgcagttttgagtcagtgtctccttgagccccttcccatccgtatccacagagtccacagtctggatgcaggttgcttcaccatccccttctggtgggcctgtgagtagctcaggtgccctcaggtgactttccaggctactttttttttttttttttttttttttttttttagacggagtctcgctctgttgcccaagcaggagtgcagtggcatgatctcagctcactgcaagctccacctcccaggttcataccattctcctgcctcagcctcctgagtagctgggactacaggcgcccaccaccacgcccggctaattttttgtattttgagtagagacgaggtttcaccgtgttacccaggatggtctcgatctcctaacctcgtgatccgcccgcctgagcctcccaaagtgctgggattacaggcatgagccactgcacctgccccagcctacatttttgtgcttgcctattctgttcaccaagctcatgtgctgtgtggccagcagttaccccgtgggatgtcatcctgagtggcctttgatccgtggaaggtggggtcacaaaggtcactcctgagaccaggcctttcccacatccccaggcatcccaccctgcagacagtgaggtctcatccctactccaaggtcccgagccgccagtctcaacccagctctcactagtgctgtgtgtcccttactatgggcctattccctggttatggggaaccgctggccacgaagcatttctcagaattgatagcagtgtttgctgttctaggcaggacttccaccagtgggcgatccatgagcactttctccctgagtcctcggcttcagggggctgtgacggagacctgcaggctgcgtgtaccattcttgtcaacgcactgatggatttccaccaaaggttagcagcacacactgtattagggttctctggagggacaggactaataggatatatataaaggggagtttctggccatgctggtgcccatctaattagcttagggtgggtctgcctttcccagcctatacccaaatgtcagtctcctttggcaacaccctcacagacacactcaggatcaatgctttgcatccttcagtccagtcacgttgacactcagtattaaccatcacacaccgatgaggccttacttttaatcatggtagttctaagaatgcatttttctctcagtccaattttggtatgcaaagtacacttgagcctatcacatagcaaatctatgtcaatacaaaataaagccaagcttcctgcatcggttgtttctttatgtgtatagacttgtcagaagcgacaacttcgggctgggcgtggtggctcacacctgtaatcccagcacttcgggaggctgaggtgggtggattacctcaggtcaggagttagagaccagcctggcctacatggtgaaacctccctctctactaaaaatacaaaaattagctgagtgtggtggcgggtgcctgtaatcccagctacttgggaggctgaggcaggaggattgcttgaacctgggaggcagaggttgcagtgagccgactgggcgacagagcaagactctgtctcaaaaaaaagataaaaatagcaacaacgttgtttttctgttctgtcacctggtattcaaggtgagcatgtgtgaagcacggcacaaatggcctagtagatcctgggcatcacagcctctctccatctgagagggattctcaggacagagcagttcctgaggtgttgcatgtgggccagaaggatggacggagtgtacctggggctgtccaggctttgtccccaggggctcttgtttgcagcttcacactgttgtgttacagctgcagcattcagtacagatggcaagtgtgtatgcagcttccccccatgtctcctgcctgcggcaaccacgaatccattttatgttcatggatttgcctgtttgggatgtttaatatcaacagaatcatgtagtatgtggccctttgtgtctggcttctttggctgagcagaatgtttctgaggctcatctgtgttgtagcacatatcagcatacccttccttcttatggctgactgatgctcacagaaggtatggaggctgacgcacctccatcgtgggtgacttcttgttaaccctactccaagaatgcctcctgagatttcccatttatctgctgttaccttaaatcccactcttaggtcaaaacaaccttgaggctgggcgcagtggctcatgcctggaatctcagcactgggaggccaaggcaggcggatcatctgagctcaggagctcgagaccagcctggtgaaaccgtctagacaaaaaaaaaaattagccaggcatggtagtgtgtgcctatggtcccagctactcgtgaggctgaggtgggattgcatgagccggggaggcagaggttgcaatgagctgtgaaaacaccactacattccagcctgtgtgacagagtgagactccatctcaaaacaaaaaagcaaatcttccaccataaatccagcggttagattcacagagcattcttgcctttccctgaggggttgacttcaatagtccttccctgtggtatagaagccctgcctgggggtaacagtgcagggatgcatcgtctctctaggctgcctgagacatggtttctgtctgtaagtccttaaacgtttctgtctgagaaactggattattcagcctctcttcagccttccagcttccccagcctttatgggtaggtttgcacagagctgctcactgcggaacagaaagatcagccatattttgtttatccattcactttgtttgtttgttttttgagatagtcttactttgtcttatttatatttattttgaaactgggtctttctttgtcacccaggctggggtacagtgactgcagcccactgcagcctcgacctcctgggctcaagtgatcctcctgcttcagcccctcaagtagctgggaccacaggcaccaccatacctggcaaatttttgtagttgtagtagagatggggtttcaccatgttggccagactggtcttgaacttctgacctcaggtgatctgcccgcctcggcctcccaaagtgctgggattacaggcgtgaacctctgccaggcctgacttgatggtagccatcctagtgggtattaagtgctatttgatagtggtttcgatttgcacttccctaatgggtagtgattttgaacatctttccattttcttattggccattttagattttttttggagaaatctgttcacatccttagcccatttgaaaactgggtcacattcatgtactgcataagaatgttctggttaacaacgagccacatatatgacagtaatcccacatagccataattttttgtaccttttttttaaactgtgtttttaccgtaccttttctatgtttagatacacaaatactgttgtgttacagttgcggcatgcaatacagttacatgctatgccggtttatagcctgggagcggtgggccgtgccatgtggcctaggtgtgcgggggctctggtctgtttctgcgcggtgggccgtgccgtgtggcctaggtgtgcgggcggctccggtctgtgtctgtgcggtgggccgtgccgtgtggcctaggtgtgcggggggctctggtctgtgtctgtgctcttggatgttcacgtgatgaaaccacctaaagatgtgtttctcagaatggatccttgtcattgagcagttcatgactgtatttgtcttactgagttgtatgagttctttatatattttagataaagttcttatcaaatatatgatttgtaaatattttttcccattctgttaattcttttttcactctcttgatagtatcgtttaatgcacaaaggttttaaatttttataaagtccagatcatttatttttagtttagctctttaggattttgattcattttgatggatcagaaaacattttgggccagccacggtggctcacgcctgtaatcccagcactttgggaggctgaggcgggcagatcacttgatgtcaggagttcgagaccagcctggccaacatggcgaaactaaaaaaatacaaaaactagccaggcatggtggcaggcgcctgtaatcccagctactcgggaggctgaggcggcaggagacttgcttgaacctgggaggcggaggttgcaatgagcccagattgtgccactgcactccagcctgggcgacagagtgagagactgtctcaaaaaaaaaaaaaaaattgttgtgtgaggtcatccagctttattctgttgcttgtggccatgcagttgtcccagcaccatttgttgaaaacacttctttccccactgaatggtcttggcacccttgtcaaaagttagatggctgctcgtgtgagggtttgtttctggctctcattgtgttcccttggtctgtatgtccatatgcactgcgtcattgggatgaagctttgtagtaggttttaaaattgggaagtgtgaggcctccaacttggttcttctttttcaggatggtttggcttttctaggtgctttgtagttgtgtcttaattttgggatgagcttgtcagtttcgacaaaagtagctgggaccctgatacggactgcatgtggggcagtattgccatctcagtgatagcgagtcttctttccttttgaatcatttgttgctaacgtatagaaacaccagtgattcttgtatattcattggctctagtcatttattagttctaagagtgtttttgtatcgattccttagggctttgtatatataagatcgtgtctggccaggcatggtggctcatgcctgtaatcccagcactttgggagggtgaagtgggcggatcatgaggtcaggagttggagaccagcctggccaacatggtgaaaccccatctctactaaaaatacaaaaattagccgggcatcgtggtgggctcctgtaatccgttacttgggaggctgaggcagaagaatcacttgaactcaggaggcagaggttgcagtgagttgagatcatgccactgcaactccagcctgggcgacaagagtgaaactcagtctcaaaacaaaaaaacaaaagaaagatcatataatatgtgaagagagatagtttcactttttcctttcctatctggatgctttttctttttcttgttgaattgccccggcttgaactccccgggcagtgttgttttttttgttgttgttttgttttgtttttttttttctgagacggagtctcgctctgtcacccaggctggagtgcagtggtgcaatctcggcttaccgaaaccttcgcctctcaggttcaagcgattctcctgcctcagcctcccgagtagctgggattacaggcacccgccaccatgcccagctaatttttgtttgtttgtttttgagacagagtgtcgctgtgtgtcccaggctggagtacagtggcactatctcagctgtctgcaacctccgccttccaggttcaggcaattctgctgcctcagcctcccaataggtgggattactggcgtccgctaacacgcccgtctaatttttgtatttttagtagagatagggtttcgccacattggccaggatggtctcgatctcctgacctcagatgatctgcctgcctcggcctcccaaagtgctgggattacaggcgtgagccaccgtgtctgtccccagtgcagtgttgagtagaggcagcgacactgttctgagtgtagagaggacatccttgttgcccctgatcttaggagaacagctttcagtctttcctcattaaatctgacgtttgctgtgggttttcatccatgccaggcactagattgagaagatttcctttgttcctggttgattgagtgtttttatcacaaaaggatgtcacatttcgtcaagtgctttttctacatctattgagataatcttacggtttttgctttttattttattgataactgcgttatattggtttggggatcttaagctatccttgtgtagggaccagccccggagggtcggtgggtctctccctgtgtgcggcgatgagagagtgtagaaataaagacacaagacagagataagagaaaaggcagctgggcccgggggaccactaccaccaatgcgcggagaccggtagtggccccgagtgtcgggctgcgctgttacttattggatacaaggcagaaggggcagggtaaacaatgtgagtcacctccaatgataggtaaggtcacgtgggtcacatgtccactggacagggggcccgtccctgcctggcagctgaggcagagagggagaggagacagagagaaagacagcttacgccattatttctgcatatcagggactattagtattttcactaatttgctactgctatctggaaggcagagccaggtgtacaggatggaacatgaaggtggactaggagcatgaccactgaagcacagcatcacagggagacggtgaggcctccggataactgcgggcgagtctgactgatgtcaggccctccacaagaggtggaggagcagagtcttctctaaactccccgggggaaagggagactccctttcccggtctgctaagtagtgggtgttgttccttgacaccttttgctaccgctggaccacgatccgcttggtgacgggcgtcttcccagacgctggcatcaccgctagaccaaggagccctctggtggccctgtccgggcacaacagaaggctcgcactcttgtcttctggtcacacctcagtatatcccctcagctcctatctctgtatggcctggtttttcctaggctatgattattgagtgaggattatcataatattggaataaaaagtaattgctaccaactaatgattaatgatattcatatgtaatcatatctaagatctatatctggtataactattcttgttttatattttattatactggaacagctcgtgtcctctgtctcttgccttggtgcctgggtggcttgccacccacatccttgcattcttgggataagcctccttggtcatggtacataatttttgtatttcctaggttggggttggtagtattttgtggcagtttttgttgtttattgttgactaatgtgagggtcacactgtcagagaagcacagccatcactcagctccggaggcaggaggagaactgggaacttcagcactattaggcgatactgaggaggattttattgtattttcatttcagctcaaggagttatgaccactcagaaaattctgatttggtctttggtggccgcacaggaaatgaggatattatttccagattgcaggtgagtttgagggtgccacaactcagtgcattcacttcatttaagccgcgtgctattaagatatttattgccaggcgcggtggctcacgcctgtaatcccagaactttgggaggccgaggcaggcggatcacacagtcaggagatcgagaccatgctggctaacacgatgagaccccgtctctactaaaaatacaaaaatttagccgggcgtggtggcgggcacctgtagccccacctactcgggaggctgaggcaggagaatggcatgaacccaggaggcggagcttgcagtgagccgagattgtgccactgcactccagcctgggcgggcgacagagtgagactccgtctcaaaaaaaaaaaaaagatatttattgttggctcaggcttgtaatcccagtactttgggagtccgaggctggtggatcacctgaagtctatacaggtaggcagcatgtacctgtgtgggttcactgtcagtcaacaggcatttactggtgctggccacccgtgcgtcttctgtgccaggcccctgtctctccctccgccagctctggggcctcccaactccttagccagatgctttccctagacccacctggctccttctcagtgagaccatctgctttttcctcttaattgtaatcataattattattattattgggacagggtcttgctctgtcacccaggctagagtacagtggtgcgatcatatctctctgcagccttgacttcctgggctcaagcaatcctgacagcgtgcacctgtgtgcgccaccacacccagctgattttttgtagagacggagttttgccatgttgcccaggcttgtctcgaactcctgggcccaagtgaaccacccatctcggtctccaaaattgttggattacaggcgtgagccactgcacctgatctttattcttctttaaaaaatacagccggccaggcacggtggcttatgcctgtaatcccagcactttgggaggctgaggtggctagatcacttgaggtcaggggctcaagaccagtttggccaacatggtgaaaccccatctctactaaaaatacaaaacactagtcaagcatggtggtgtgtacctatagtcccagctactcaggaagctgacttaggagaatcagctgagctcgagagtcaaggctgccataagccaagactgcactgccgcactccagcctgggcaaccggactgagactgtcctaacaacaacaacaacaacaaaagacttgtgaggcaaaaatgatgtgtggggtaaaatgttagccagaggttaatctgggtgaagggcacatgagtgtcctcctgctgtttttttttgttgttgttttgttttgttttgtctgtttgtttttgagacagagtcttgctctggagtgcagtggcgggatcttggctcactgcagcctctacctcccgggttcaaactattctcctgcctctgcctcctgattagctgggattacaggcgcctgccaccacacccagctaatttttgtatggctaattttgttggccaggctggtcttggactcctgacctcaggtaatccatctgtcttggcctcccaaagttctgggattacaggcgtgagccaccatacctggctgtttttttttgtttgtttttttttgagacggagtctcactctgttgcccagtctgaagtgcagtggtgcgatctgggctcactgcaagctccacctcccgggttcacgccattctcctgcctcagccgcctgagtcgctgggactacaggcacccgccaccatgcccagctaatttttttgtattttttagtagcgacagggtttcaccatgttagccaggatggtctccatctcctgacctcgtgatcctcctgccttggcctcccaaagtgctgggattacaggcatgagccaccacgcccagctgttttttcttaattgataagtagttgataagtagtactgtaactcctgggctcaaggaatctgcctgcctcggcctcccaaagtgctggcattacagacgtgagccacagcacccggcctgcactgttctatatttgcaatttcaaagtgatttccaattgaaatagcttgccccacttgttccttcttgccctgtccactgtggagacctctccctgacccctgacgtctgggtccccgactggctgggcagtgagccccgaggccttcctgtgccagcatactgctctttttcaggagatggtagctgacctggagctgcagcaagacctcatagtgcctctcggccacaccccttcccaggagcacttcctctttgagattttccgcagacggctccaggctctgacaagcgggtggagcgtggctgccagccttcagagacagagggagctgctaatgtacaaacggtaacacctactaccacctgggcagggcagcaccacctgggcagggcagcatctcatgacggtcctagaggttctttgtagtgagtttgtttcccgttacttacttgtctgtgtgtccccaccccaagcctgtccatttctgtggcacatgccacggagaagaggatctggagggttgaaagtacttttgattaaaaccttccagccaagcgaggtggttcatgcctgtaatcctagcattttgggaggctgaggtgagtggatcacctgaggtcaggagtttgagaccagcctgaccaacatggcgaaacgccatgtctactaaaaatacaaaaaaaatacaaaaaaatttagctaggtgtggtggcgggcacctgtaatcccagctactcgggagactgaggcaggagagtggtgtgaacctgggaggcagaggtttcagtgagccgagatcacgccattgcacaccagcctgggcaacagagcgagactctgtctcaacaacaacaacaaaaccttcctgctcagacgtggagggacgtcgcagaaggagctcttgtgaaagtagggaaaagtgttcagaaatgcccacggcggctgcatttataagaagcagcgtggagtcatttaattttacagtcatagggaattgcttcactagacagactggtgcgtcatccacttggttatcgtgtaactgtcagaagttgttggttattatgtaactgttaaaagttgtttgtttggtaacacattttgaatgcagtgggccaaacacagtataggggaggtgggctcagagtgcaggctttggatgggacagagggacacaggccaaggctctggttccaacagtggccctgggtttcagggtggtggttgctgctctgagagtctgagcccttgggaaggagcagagtgtacgctgtgctgtcgccaccaatacagccccttctttccaggatcctcctccgcctgccttcgtctgtcctctgcggcagcagcttccaggcagaacagcccatcactgccagatgcgagcagttcttccacttggtcaactctgagatggtaggtgccccgtgtgcacgtgtccgtccgatctgtcagtgcctgtggcgctaacagcagctcttgcagcctccatgcgtgtactgaccgtgtgaattactgaggaaagggttcaaagtcaaatagggaacagtgtctggaatgccatgtgagggaggaccccacccacagccaggacggcgaccagcacatcaccaaaccagctgtaggttgccttctcccaagtttgagttcctttagtttccctcaagttttaatgattttgacacatggaatcgtacagaccattttgtgtgccacgcacctcggttcatttatttctaatctcaacatgcttcatgtgtaaaaaaagccttgtggtgatctgactaccgctgttgcctgccaggcagcccagttatcttccattttagacactgcccagcgtgagttgcagggtgatcttaaccagcaggctgggtgcggtggctcacgcccgtaatcccagcactctggaaaggtgggggatcacttgagcccaggagttcgagaccagcctgggcaacatgacaaaaccctgtttctacaaaaaatagaaaaattagctgggtatggtggtgcacgcctgtactcccacctacttgagaggctgggtcaggaggagtaattgagcccaggaggcagagttgcactgagccaagatcccaccactacactccagcctgggtgacagagcgaaactcttgtctcaaataaaaagaagtgacactcgctgtggggacgggcagcgtagggacccagttggtcagagctggggagacggataccagcccctcccactctacagagagcagcttctgctcccgaaggcctttttcttgtttttgaagatgcacaaatgtgagagatggaattcaggttccatgccagctgtgcagcattttatatttttatttatttatttatttatttattttttgagacagagtcttgctctgtcgcccaggctggagtgcagcagtgaaatcttggctcaccctgcaacctccgcctcccaggttcaagcgattctcctgcctcagcctcctgagtagctgggactacaggtgcctgccgccatgaccggctaagttttgtatttttagtagagatgacgttttaccatgttggtcagtctggtcttgaactcctgacctcgtgatccacccgccttggcctcccaaagtgctgggattacaggtgtgagcccggccttgtgcagcacttcaaaatgtgacaaggaaagcagaggacgtgagactagcaaaagctttcagaaaatcactatggtctcctttgaattcttatgaatggctgtttttcagaaagctctcagttggcacgtgacagccgacagacaggaaaacaccatagacagcacttggttagtgaagggaccagaggatggttggcccttggtattagtgtcgtcctcaccacagttctacgctccgggtgcgtccccttccctgcggctgcttgtgcctccctggcttcttcctggagcctacaagactgtttgggccagagctggtgggctgcaggatctggccgcccagggaagccgttaagtttcaggacagcacagccagggcgccaggcccggtcagcccaggagcaccatccatggtggccacgccaagccttagcgagtgtttttctcaaaactgaatccacagcagccactctgcatgttggtctcgcctctcttcctgtgggcttttcttacctgccttgaactcttttgcagagaaacttctgctcccacggaggtgccctgacacaggacatcactgcccacttcttcagggtgagatgctccctcagcccctctcgtggccttctcagaacgccgtgggtggatcctcctgtcagcttcctgtgagttccttcactctactagttgtgggtcctcacaaaccgctgacctcctgctgcgttctctcctgcagggcctcctgaacgcctgtctgcggagcagagacccctccctgatggtcgacttcatactggccaagtgccagacgaaatgccccttaattttgacctctgctctggtgggtcagctgtcttgtttggtgttttgttttggggatgagtgggagactccacagctgcctctggcatctctgcagcacgtctccatcacgggtgttaccatctcagggaaaatgcatcaggagacatggaagccacagttaaagatgccagctcatagcagatgagggccgcacatcctgagttcccagaaccgtccctgcccccaccgccgtcaccatggcacccgcaggacttctcccctgtggaccccactcagaccccacgggcaccttcatgtccacaggggtgcagggcttgtttgttcacggtcttgggttgtgcactggctggaggctgtacggtggctgcctgtgccccgtcacgagagcatgactgtggcccacttgcgcctgactatgctttcttgggacttcggagcagagacttcacctcagctcccgccagagctcagcaggctcccctagcagcccagggtcccgagagtgggaggagggcagcatttccctcacttccctggcggctcacttagtcctgaagaccacagctgtcgcccttccttctcggtcatcagggacaggagggcctttttctccgcagcacggcatgttccccagggagctccccaagcaggctgcatttgcaccgagttgtagctcagttggtggaattcgtgagaaatgaactcttcggtgtttagaacgccacctctcagctgagggcatccaaggaccaggcattcccagctcagggcagtgtggtctcttcactgtttcgttcccagctcagaggagtgtggtcccttcactgtttcgttcccagctcagggcagtgtggtcccttcactgttttgttcccagctcagaggagtgtggtcccttcactgttttgttcccagctcagggcagtgtggtcccttcactgttttgttcccagctcagaggagtgtggtcccttcactgtttcgttcccagctcagggcagtgtggtcccttcactgttttgttcccagctcagaggagtgtggtcccttcactgtttcgttcccagctcagggcagtgtggtcccttcactgtttcgttcccagctcagaggagtgtggtcccttcactgttttgttcccagctcagaggagtgtggtcccttcactgttttgttcccagctcagaggagtgtggtcccttcactgtttcattcccagctcaggggactgtggtcccttcactgtttcgttcccagctcaggggagtgtggtcccttcactgttgcgttaggccaggctcttccttctccaaattccacgtcttccatgagtgtgggtaataaatgcctcatggaactgctttgagccttaattgacgtaaaaaatactggctttggagttccagagcgcagggcgagtgtgggcctgtagtggcctgtaggagcactgggggcttgtcatggctggggcagcggaggtgtgtccatctcagccaccctcatctgtgtgctggtgctctctccataggtgtggtggccgagcctggagcctgtgctgctctgccggtggaggagacactgccagagcccgctgccccgggaactgcagaagctacaagaaggccggcagtttgccagcgagtacgtgtgggtggtgagatggggtgtgcccgcccagatgcacttcgggacctgctcaaggtcatctcctaaacaccctggcttgcttgagagaagcggtgtgggcagcctctcgtgtgagcagggagaaaagaaccgagttctcgtggtggtgggcgcctgtaatcccaactactggggaggccgaggcaggagaatcagttgaacccaggaggtggagtttccagtgagccgagatcactccaacggccaatagagcaagactctgtccagaaaaaaaacaaaaaaaaaaacagcctctgccagtgtctcgtctgagtgaggaacggcctctcccaggctcccgtctgagtgaggagctcgagtgattcctttgcacctgctccccttcctcttaaatctaatgtgggctcctagagtgcaccgcgtgctggtagggtcagtgtcatggggacctcagggatgcagattctcagcctaccctgacctgtcgaccccagtcagatattcacgggtccttgcaaaccatcaagctcctggcgcaatccaggctcacacacccttctgaggaccacagagctgacagccactccacctgctgaatgtgggtgccgtgttcttaaggggtcgtcagagggcactgctagtacccatcctgcctccttggagaacaccttactttgtgactagttttgaatcactgatgccacaccgggtcccctcagggtttggctgctcgccgtctgctgaaagaagagaagagggccccggcgcggtggcgcacacctgtaatcccagcactttgggaggccaaggcaggtggatcacctgaggtcaggagtttgagaccagcctggccaacatgtgaaacaatctctactgaaaatacagaaatgagctgggtgtgatagtgtgcgcctgtagtcccagctactcaggaggctgaggcaggagaattgcttgaacccaggaggtggaggttgcagtgagccgagatcatgccattgtagtccagcatgggcaatgagagagaaactccatctcaaaaaaggagaaagcaggtcacacctccagttctaattctacaaacacagatcagattgtctgaagttttgttttttgttttgttttgtttgagacagagtttcactcttgtcacccaccctagagtgagatggcacgatctcggctcaccatgacctccgcctcccaggttcaagcgatcctcctgcctcagtctcctgagtagctgggattacaggcgtgagccaccatgcctggctaattttgtatttttagtagagacagggtttctccacgttggtcaggctggtctcgaactcccgacctcaggtgatctgcctgcctcagcctcccaaagtgctgggattacaggcgtgaaccaccacgccctgcctcgtttttgtttatttgagattgagtctcactgtgttgcccaggcagatctcaaactgctgggcttaagcgatcctcctgaagtgctatgattgcagatgtgaaccgtcatgcccagcttatttaaagtctcttaaaccacagcattgtttcattaatttcctaccaattttttaaccagccagaaaactcagacaccacactggggccagagccaggcagtcctttgttctctgttgtaggagggaatgcctgatccacagggccaggcatgggcaactgaggaaaatgaggcctcttcttccaaaatgtaggcagctggggcccaagagcacagggcaaggtagacaggaccaggccagctgcctgctcagtcagcagctctcagaacgccaggatgctgtgggggcagcaccagcacctgcccacactctcacgtggacctgggggatgcagacctagtttctgatggtcctgaaacccttctctgtcctctgatggaaaggcaggccccaaaggtgacaggtgggaataaggacttggtttctatggcgtggttgtatggttgtaaggccctgcaatgaccccgttctctctgtcccagtttcctctcccctgaggctgcctccccagcacccaacccggactggctctcagctgctgcactgcactttgcgattcaacaagtcagggaagaaaacatcaggaagcagctaaagaagctggactgcgagagagaggaggcaagataggaaattcttttactgatttattttctcgcaagcttggtttcaatcagtgctatttctctgggcttgtctgatgaactgtttttctaaagacaaatatgtggcttggagcaagactttttttttttttttttttttttgtatttttagtagagacggggtttcactgtgttagccaggatggtctcgatctcctgaccccgtgatcctcccgccttggcctcccaaagtgctgggattacaggcgtgagccaccacgcccagctggcttggagtaagactttgactatcaagtttactagtaaaaataataatttcagttttttaaatggttgtatgtagttgagacagggtctcactgtcgcccaggctggagtgcagtggtgcagtcagctcactgcagcctcttctgggctcaagccatcctcttacctcagcctctggagtagctcagactacaggtgtgtgccaccatgcccggctaattttgtaattttttctgagatgggggtctgtagtccaggcatggtggctcatgcctgtaatcccaacacttagggaggccgaggcaggcggatcacttggtgtcaggagtttgagaccagcttgggcaacatggtgaaaccctgtctctactaaaaacacaaaaattagtcgggtgtggtggtgcgcacctacaatcccatagcctgtaaagctactcaggaggctgaggcaggaggatcacttgaacccagggggcagaggctgcagtgagccaagatcacgccactgccctgcagtctgggtgacagagcgagacttgtctcaaaaaaaaaaaatttgtttaaagtaaaaattaaaagagatgggggtctcactgtgttgcccaggcttgaagtgcgtttcttcagcttatttttatcctcatcacagcccagcgtaaatgctgtcagccttcaagtggtgccttctgtgttcatgctgcagtagccttgattcatgtgctgagggacagccccagataagcttgcagtgagacagctcagacctggggtgctggggacaagaggcagcaaggatgggaccgtctgcagccataggcatagggaaaggagtgggagaggctgctcttgaattccaggccagggaccatgttcgactcagacccactgcccacctggttgctgcaccctggaaagcctgactgcccccacaagaccagtgacacccacacagctctctgtgcagggagccaagggtggtgtgtgcagaacaggaacagaaacaagcatcccacaagagagctggaggcagcagccctctgtgcccagcccgagatccgcaacgcataggtgccatgtcagcacacaacttacaccagctcaaagctggatcgacagcagcgcccagggttttggtgattataaccaccctgcaggggttcttctgagtacgtcttcaggtttcttgtgtagttttgttagaagggattttagtggctccagggccttaggaccctagtgtgcagcgaggagtgtccacagagaccctgcccagtcaggccctactttaggctggagcctgtgggcttatcttcaaggattttacaaacacttctgacaggaggccttgcagggagatgatgctgagttgggactgcgcacagccaaggagaccgcagcagtcttctctttctggctcttgtcactttttcaaactgtttctagctttgtttaaaggcaagtgtgaaatgacccagccagtagtaattaattctcaattaagctgtctctctagaagtgattggaaagttttctaagatccacttaaaggatttatggcctagatgtaaaaaatttcaattaaagaggaatgtgtcagccttatttagaatgacagcacaggtaattttaatgtaataataagtgcacgtttttatttacagctattggttttccttttcttcttctccttgatgggcctgctgtcgtcacatctgacctcaaatgtaagtcagaccttaccagccaaggtgtcctctcccactgtgggccaggcaggggcaccaggcagccagcttccaagtcagggtttccagactagctcaggagctccttgtgtttgcggaagtgtgagtgagaactcccaggccgtgggttttttttttttttttttgagatgggggtctcactctgtcacccaggctggagtgcagtggtgtgatctcagctcactgcaacctcagcctcctgggttcaagcaattctcctgcatcagcctcccgagtagctgggattacaggcgtgagtctgtcacacccggctaatttttgtatttttagtagagacggggtttcaccatattgccaggctggtcttgaactggcctcagtgatccgccgacctcggcctcccaaagtgttgggattacaggcatgagccactgcatccggcctgtgggcctttcttttaatgtcttatttgaggacgtggtgcagcagccttggtgtgggtgctcgaagtccctggcctcctacctgagcctcttctgtccagaggcccagtattaccttctataggtaaaactgtcaccagttttaagacttacaataagcaaagaggaaatgccctcttctgtgctgagggctgtaccctcctacccatgggagcaccaggtcggccattctcagggttggtctcctgcggtttacagagcaccacagacctgccaaaggctttccacgtttgtgcagcaatcctcgagtgtttagagaagaggaagatatcctggctggcactctttcagttgacagagagtggtaagaaacacgctgctgaggcacaaatgcggagggccgctcttttcagaggcatcttgcaaatggttaagaacgagccctccttgaggttccttgctaagtaagtttataagctccattttagttgggacagattaagcacaaacttgtttaaagcaataagataatttactggctcactggtcaaccccaggaccaatgggcctatcatggggactgcctctctctgcaccacacccaccctcctgcaagaggtcgacccccccatcctctcccagctgctgacaggtacctgggtatcctcagctcaggctgttcgccccacactatccccacagccaggcctcccagggtacacgtcccgacccccaggggtgtccccagcactgataataggcagagatgtccagagttgcctgagccacttcttggtgttgcagacctcaggctggggcggctcctcctccgtgtggccccggatcagcacaccaggctgctgcctttcgctttttacaggtacctccacccacagggctggtcagggctgggcagtgtttcccagacccccatctcagcacctctgggtcccgccagatgggaagggttgtctgtgcctctgctccacagatgagcagtatcccttggcatcacctgctacctttccagcagtctgtagccatttgtcactatgtctttacctctagtcttctctcctacttccatgaagacgcggccatcagggaagaggccttcctgcatgttgctgtggacatgtacttgaagctggtccagctcttcgtggctggggatacaagcacagtttcacctccagctggcaggagcctggagctcaagggtcaggcaggtgcaagggccagtcccacctccaggggagctccccccagccggaggctccttctgccaaagaatgttccggcacagcatgcagactatgggggacacaccagccctgtttctgtatgtcttctaacctgtgagtttgcctgttttctctctagggcaaccccgtggaactgataacaaaagctcgtctttttctgctgcagttaatacctcggtgcccgaaaaagagcttctcacacgtggcagaggtaacgtcaagatgcccaccttgggccatgtgggggacatgagaattgacagctgcctgggccatgtgcctgcctggctggcaatacaactcgactatttctgccagagcccctcccctgtggtctgaggcctagtgggcggcatgggctgaggacctgctcctctctcacagctgctggctgatcgtggggactgcgacccagaggtgagcgccgccctccagagcagacagcaggctgcccctgacgctgacctgtcccaggagcctcatctcttctgacgggacctgccactgcacaccagcccagctcccgtgtaaataatttattacaagcataacatggagctcttgttgcactaaaaagtggattacaaatctcctcgactgctttagtggggaaaggaatcaattatttatgaactgtccggccccgagtcactcagcgtttgcgggaaaataaaccactggtcccagagcagaggaaggctacttgagccggacaccaagcccgcctccagcaccaagggcgggcagcaccctccgaccctcccatgcgggtgcacacgaagggtgaggctgacacagccactgcggagtccaggctgctagaggtgctcatcctcactgccgtcctcaggtgggttcgggcttcaccgcctggccctctgtggtcacagaggggctcggtggcccaggtggtggttccgcctccaggggcagggccttgtcctgggtctgtgtcagcgggtgcaccatggacatgtgtacattgaggttgtgggccttctcaaaccgccggccacactggtcacaggcaaagtccagctcagtctcagccttgtgtttggtcatgtggtacttgagggatgcccgctgcctgcactggaacccacagacctcacacctgggggacagaggcagataagaaggtgcgagggccacagccctgggagggggtcctgactcacacttactgcaaaggcttggctcccgaatgtcgcatttggtggacgagaaggtgcttccgctgcttgaaggtttgtccacattcgtcacagatatagttccgcacctctgagaggggagagtccagtgagtccaggcccctgatgctccaacctcccggggggacgacgatgacaatgtgaaaccatcacagctgggaagacatttctgcacatggttcaccatgcagtgggcccaagcaaggggcctatgagggcctcgtttattaagatctttaaactgctttatacactgtcacgtggcttcatcagctgtgtgcatttcaggatggtttttaaagaaacctcagaaagctatttcctt

SEQ ID NO: 98 - DNA, 40051 bp, Homo sapiens
ggattggctgttcggagcggcgaggggcttggcgggagcttccagtcgctcgagagcggagagcggcaccatggccccgcgggggcggcggcggccgcggcctcacaggtctgaggggtaagtactgccgaccctcgggagcgcggggccggagaccagcttgaactgcttcctcgcctgccgtggtttgcgcctcccggcgctgttggtgctccactgtggaggtcgcccgagtggccaatcgcccgggtccccggcttcctcctcagtctagtggggataacagtgatcccacctgcacgggcctgtcggggcctaacactgcctggcgggtgggagagacgtcagccagtgtcgtgtcgttttgtggggagggggagtgccgtccaaagtagtgagtctcaaagtgctagcttgaaagcaaaatattcagcaaatacgtattgcctgcggtttgccagactttgttagtggagttttattctctgactgggaatcagttttcttattttgaagaccctggtgttttcttactgcaaaccacagaccgtaaactggagcataaatccggctgggggaccgagctgccgcttgcggttctccaggatggctcgagcggtttttgtttaccaaagaaagcgagcgtttggtcggttgcaaaacgcgctctagaatgctggtcgctgattcgttggcgaatggccatccaaggcccggcctggatctggcgggaagggtctcggcttgctgcagacggtgcacaaagccatacgccaagacgatctgaagagaacaggagttcccccgggcctgggaaggctgcctggaggaggaggtgctggtagatgcggggttagggtggaaaagctggagcaggacaccgcaggtgggtggggaaaccgagaccagacttctgtggccagtggaggagaatgaagactcccccagtgcaaaaaaggattagaagagaatgtcagccttcaatgtcagctgaaaagagtttatctgaaaggctagtggtttttgttgtctttttttatttttatcttttaacatttttgggtttgagactcatgaaatctgttcatgcctcctcccaaaacacacttacgcacatacaacagaatttttttttttttttttttttgagacggagtctcactctgtggcccaggctggagtgcagtggcgcaatctccgcctcccaggttcaagcgattttcctgcctcagactccagaggagctgggattacaggcgctcgcccccacgtccagctaatttttgtatttttagtaaagacggggtttcaccatgttggccaggatggtcttgatttcctcacctcgtgatccgccctcctggggttcccaaagcgctgagattacaggcatgagccaccgcgcctggcccagaaattttacctgtgggttgtcacagaggtttctgtctctcagaagccccaccttgactccagcgtaaggcaaggaggaaccttgactttttttcccccccaagaaaggacaagacagctcaaagagtttaggttaagaagtttatgtggtctagtgtgtagctgggtttctgttacctggctatgtgacccttgataagtcacttaaattttctgaatcccggaatcatcatctataaaattgccataaaaccaatacttgtcttacctgcttccttaggtttcatgaattaaataaataaatcgtgaacttgttagaaatgcagaatcccagacctcaccccagagggactgaatcagacactcctggggtggtgccaagcaacctgttcaacaagccctcttgagaattttgatgacactcaagtctgggaaccaccgctctgaacagttttctaactttttttttttaactgtgattcacagtaatgatgttttacatcacacttagtacacgtgtgcacacatccacacataaaacaaaaggcttgtgaacatagtatatccagtgcaatgcttcattttatattttccttttttattgtttgtttttttaaaaatgctggcctggcaatcttaaaagacattataggacaattgatgtgatttgggtatggactgtagattagattatggtatcagtgttaaatttcttgattttagaaattgtaccatgaatatgcagtataatgccctcttaggaaagacatattgtagtatttaggggtggaagtgcacagtatctccagacacacacacacacacacacacacacagagcacatgagtaaagggcatacagaaggtccttgtgctatgtttgcaacttttctgtgagcttgaaattatatcagataaaaggatactaaaacattggtttagactaagctgattttgctgtctacaaatgagaaaaatatggctgcaatctgcatggcatattttaaagtctaattatgtactgtattctcctggagtatcccccccgtacccttgtacgatgcctggttggtggaggatagtctgtacatattcactgactgctggcactattattagtaataatgatatataatcctgccactgttatttcccgtttttattcttgtcaccattgttacatttgttttcttgaagcttgttgaagatatatatacaactttatcatttgaagctgtggtccaactgagagagtgtcaagggaggtcgagggcaggccctggatttgaactgatgtaaattttaatgcaggcttgtctccctcctggctccgtgttgctgtgggcaagcacacatctgtaacatgggattcacttctaccttataggactgttagaattaaatgagaaaaggacgtaggagagccaggcaccggatggagcaggtgtcggggcttagcgttagcctacctcccctttgttcagctgtgcagagaaagtcaatcactgctgattgattaaggcctcagggaaaaagttaacagcaggattccaacttttccatgtccctgagggggagaggtatgttattttatacattggtgataggatttgacctataaaaaataaatttgtggaatatgggttcttgtttttttttttggtaaaaatgcgcggaaagggtcataactatggtgtttcctcagttattttaactatttcctaactcttgtgtttttttgctgtttaatagcgcaagacgttcaaagaacactttagaaagaacacattccatgaaagatgtaagttacctttttgtgttgtggttttctcaaaattgacagtacaaaataacattttttgggtacctcagttttgtagacttcacttggcaagttcaatgtttattgtagtgaaaaagtgtgttcattttcctcacactttttccggtatagtggataaaatgacttttgttaatgttttagaatttcctttatttctgagccgagtttggttttattttcgtttagataattgacttcatgtaaaaattgtacagtgctgtaagcttttttcacttaaagccatttctcctcattgtacttttcaagaattgttttatgatttcatgatactccacttagttcacattacaggtttacttttctttagagtcttagaataaatgtatgttaaaggcatgtgcatttctttaacgttcttgatagctaattccagtttttttttccagtggcttgtgtgattgacattgtaatctcacattaacagtgtatgacagtgccaggcaccccggaaggagttccttctgcttgttctgccctgggctttctctgtcctgcatagtccttaaccccagcctgcagacgatagctctcttcccctctgggaaaccctgggatccccctgcagggttttgctcagcgctctgctcccaccccggcattacttcacgggttctttgggtggatttctctcagctgtcctgccttgcccctgccattggtagccaaagtacagtgtgcctcggagggatttctctaagctccagccttagctggaagcccagagtgcctggaatggattcagctttcctgtccttccctctgcaaggcagtccctggtggaggccccctatgccttgggaggggctggaagacctgccagctctctccacattccacccccaagcactccaggaatgattctttcactgggggcatctgaatggtcaagtttttatatggtttgccaattttatttgacctcctttataccttccagaattttcttatttttgtatctgttaatagtacccttccacattttctggaactaccatgaaagtttttctcattttatgtatgttttcatgtttcattagatttggggtagcagacttcatgggtgtatcagtatattgaactctaaaccctggtgtcctttagtcaggagtttttacacatgtgtacccttaaaactgtttatgaacttttgggtatatgggcatatttccggagacaggacccatcactttccctaggtcagaggtttaggcaaactggcccatgggccaaatctagcctgccacctgtttttgtatatccctgcaagctaagaatggtttttaccttttttaatggttgaaataaaataaaaagactatgtcataatatgtgaacatgatatgaaattcaaattgcagtgttcaaaagtcaaattgtattggaacacagccatgctcattcttttctgtgtggttactgtctgcattcatgtgacagtggctgagttagtagtcaaaacagaaaccttacggcctgcaaagcctaaaagaatttactttcttgtcctttatagaaaaagtttgccaatccatgccttaggttatcaaaaaattctatgtccccaaaaagtgttagcttgcttctttctttttattttaactgaaacattgtaattgtacacatttgtggggtctgatttgatcttgccatacatgtctatgttgtataatgacccaatcagggtaggtagtgaatccatcaccccatgcataaggattgcttccttaggcagcagtgattacaagaatattcttgctgtataaatcaacctattgttctttgtgagagccaactcaatgactcaactttattcacttttagaaagctggtcaaaagtgcaagcctattgacgtgttcgactttcctgataattctgatgtctcaagcattggcaggctgggtgaaaatgagaaagatgaagaaacttatgagacctttggttagtactttaaatctttatcctaacataactctaaagcaacaacatttaggccagatataataaaaaatagaagtatcttcaaatataaaaattagttgcctgcatgtaaatataatgttctctggggagtacttgataatttgaattaattttcctcacttacgggtacattgaaactaagaacattatcaaagcggcactcgtctagtagtattcattaacaatctggtcacatgaggacgcttactatagtactctgtaataaggggaacatagcatacatttctcacttcactctaccatttgatagagccattaatttagggaggagaagagtatgggtaattttcctttgtcctaaactcatggaggcaggggatgcttcgggagagccagtgggagagcttcacctgtgttccttggagtgtgaggtaaaaggccagtaccaggctggccaggagtgtgtgagttgtcagggtgggctgcttgtgtcactgggcactccagaagccagaaatgacagagaaaatgccatgtgtccccacatctagaactgcagtagtcaggcatttttgctggaataagttttaagagaattttgaaggcttttggtttaattttttgtttaaagaaaatattatacattttataaggtgaaatgtattcaccagaataatgtcttttattatgacttgataaaaatgtcctatttgtctaaaatctaaatctaaaagatctgaacctaaaaccccataattttaaaaatggaaatgaattcacataccataaaattcacccttttaaggtgtacatgtcattggtttttaatttattcacaaggttgtacaaccgtctgcattatctaattccagaaaattgttatcctgtagagaaccctgtacccatgagtggtcactccctcttcccccttccttcaagcccctggcagccatgaatctccttcctgtctctacagatttgccatttctggacatatcagtggaatcctagactctggtcctttgtgactggcttcttttacttagttttcagggtttgtccatgttgtaacgtgtatctacctcattcctgtaagtttttatagctcagtgatactccattgtttggatataccgcagcttgttacccatttatcagttacatttgggtggtttctattttttggccactgtgaataatactgctgtgaacatttgtgtaagagtttttgtgtggacttttttcacttctcttgggcatatagtgggagcagaattgctgagtcctatggtaattctatttttaactttttgaggaactgttttacaaagcggctgcaccactttacaattccatggcagtatatgagagttcccgtttctgcacaccttcaccaaaacttactgagttttttattctagccatcccagcacctcattgtgggtgtgagtgtgtgtatggggtatgggtggtaaaatatagtttaccatattaaccttttttaagtgtattaactctgtagcagataaatacattcacgttgttgtgcaaccatcatcaccatccatctccagaactttttcatctttcctaactgaaatgctccacctattaaacaacttcccattcttccctcccctcaactcctggcaaccatcattctgttttctaggaatctgatgtaaaaggaaacatagaatagttggttctttggtaactggcttatttcatttagcataatgtcttcaaggtttatctgtgttgtagcctgagtcagaaattttttttttttttttttggagacgaagtcttcctctgtcacctaggctgaagtgcagtggcgcgatctcggctcactgcaacctccacctcctgggttcaagcaattctccctgcctcagcttcccgagtggctgggattccaggcgccccccccccccaccccccaggaccaccaccaccacgcctggctaatttttgtatttttcagtagcgatggggctttgccatattggccaggctggtgttgaacccttgacctcaggtggtccacctgcctcggcctcccaaagtgctgggattacagacgtgagccactgcgcccagccagaatttcctttttaagctgaagaacagtctgtatgtaccacattttatttttatctactcatctgttaatggacccttgggttacttctgctttttgactgtgaataattctgctattaatactaacatgagtgtatcaatatctgtttgagtccctgctttctcctcttttggacatttacccagaaatggaattgctggatcatatatattttatattttcaggaatcaccatttccacagtgcctgtgttcccaccagcagggcccaagggtttcagtttctccacatccttgcctacacttgctattttctgggtgtttgtttgggtgtgaagtactatctcactgtggttttgatttgtatttccctaattactaatggtgttcagcaccttttccgtgtacttatggctgaccatttgctttttttttccctttgaccttcttatgtatgattattggccatttgtatattctttgaagaagtttctgttcaccctttgcccgtttttaaattggattatttgtctttttattatgaagttgtaagaatccagtttatgtgagtggttatctgtggacgtttgggattgttctatttcttttttccccccttgttattcacagcaatagagtaaataaatccctttgcctcgtggagggcaatacaaagtatactactaacttaaaaattgtgcagttgatatgttcattatttaagcagctgtttagttgaaaaaatgttgaagtttgcactgtcatgctaaactttgagcatgaagaaatggttgcttggctcttaccaggcccccttacagcagttcagctctgtcaccactggccacctcttcttctccaagctctctacccctgcgttaagtcctgggtctctcctgttactcctctttcctgagcacccgctaggagcatctttctcctcttagcatctcctttctgtgcctttccaccaagttcatttgctctccttctcttttatcttcttcctcattcaaggtatctttttatgttatctaaaggctctggcatcccagagtaaagcagagaggaagtaagggaggcctggaatctccccaaagggcttttcattcaaaaatactgagggcccactatatgcagggtactttgtgaggtgacctctctaggcctgttgagtttatagtttaatgcagtggtctctcatgcagagtgtatgacgcctgacagggatgaggaaagaaaatgttggacttccgatttatatttttatttcattaaaatttccccaacctgggcaacatagtgagaccctgtctctacagataattaaaaaattagctgggcatggtggcatgtgcctgtagtcccagctatttgggaggctgaggcaggaagatcgcttgagcccaggtgcttcaggctgcagtgagctgagatcgcactactgcactccaggctgggcggcagagtgaggccctgtttcagaaaccaaaaataattccatgtaagtgcagtaataaaggtttattattcataaatattcatgtatttattggtgatagggtttacaatttttattgttgaggtgtgagatcaaaaacatttgggaagtggcctgtgtaattgattttgattttgttagttgaacaaagattgttttgtactccattgtaagggaataaactacagtactgcccaaatagccagacttttaaagttgtgcttcttttttgtcttttgaaagatcctcctttacatagcacagctatatatgctgatgaagaagaattctccaaacattgtggactgtctctctcttcaactcctccaggaaaagaagcaaaaagaaggtactggtgtatttcaagcaattgtttattcatggttaatgggatttctgagaaactctttaagatagaagctaataaaacaaaagcatttcaagatcctttgagccaacttgttatgctttttctcaagagaactgaggcataaaaactttattaataattgacacgataattataatagctgtgataactgacagaattcacacctgattatcctagaaatcatgcctgggaagatagtttagctttgagtcaaataagaaaggagggaaagattttacaagcatagaatgttaggtgatttttgggaggtctctttcatttacaaattctctataattatcacaaatgagatgtttccttgtatatggtaggtgataattacaaagcaataaaaaggctgtttcagatgcactgtccctgaagtgcattggtttgagtctttgagatttatgtgaagctataggtccagaaaatctctataaaaatgatttcatagagaaaacttgggagcaagttatataatgcagaactcttcgataactgtagtactcatttaaaattatctagagcagctctttgacttagggacctctgttgggtaacaggtcagttctagttactaaatgtatttagcaagtatcaaaagtgcagtgtatttttgtttggttgtttgtttgtttgtttttttgagatggagtcttgctctgttgcccacgctggagtgcagtggctcaatctgggctcactgcaagctccacctcccgggttcacgccattctcctgcctcagcctcccgagtggctgggactacaggcgcccgccaccatgcccagctgattttttttgtatttttagtagagacggggtttcaccatgttacccaggctggtctcgatctcctgatctcgtgatctgcccacctcggcctcccaaagtgctgggattacaggcgtcagccactgcacccggccaaaactgcagttttaaaacaaatatcccagctgggcagaaatctgagaagtcattttgagattgtctacactagggaagttttatagtacttggttattttggagactccagcttatttttttttttttttttttttttttgagatggagtctcgctctgtcaccaggctggagtgcagtggcgcaatcttggctcactgtaacctccgcctcccaggttcaagcaattctcctgcctcaccctcccgagtagcttggactacaggcacgtgccaccatgtccagctaatttttgtattttttagtagagatggagtttcaccatgttggccaggatggtcttgatctcttgagctcgtgatccgcccgccttggcctcccaaagtgctaggattacaggcgttagccaccgtgcctggctgactccagttttatatgttactgaaaatcagtaaaagtcatacatttggaaaacgtgctctactttaaacagtggtgaatgtaatttttaaacaggaatattttgagtaggtaacaccttcacatggtttaaaaatataaaaaggtgtatagtaagtcttcatatcatgtctactatccatctagctcctagaacccgattcttccctctcccttattattaatttctcatatgtccttccagaatttcttggtgcatataaaagtaaatatgaatacacattttaacccttttttgtctacaaaaggcagcataggttgctacctaggttttttcacttactacatcttagagatctttacatatcaatacacatggagctttctcattcttctaccctttccacagcatgggtgttccttagtgtgattatccagttctgtatagatgggcagtcaggctgtttccagtctgtgctgtcactcccagtgccactgggagtgccatttcacacttgtgcctgtgtatctataggatatagtcataaaagttaaattctgagtcaaatgaaacgtgtttgtcctttttatagttattgccacattgccacctaagtgagatcaaacttggatttttgccaatgtgataggtcaaaaatgctatcccagcctagttctaatttgtattcttaggaatgattgagcagcaatcatttaaaagctcttgaatttctctttctgcaaactgtttatatcctttttcctattttctagttgatgttggtcattttcttcatgacttcatttaaacattagtgagattagccctatgttacagtttttttttgttttgttttgttttgttttgtttttactggttcatctctcttttgacaaaacacctaatggtggtggttttttttttcaacatagaaaatgttcagttttatttagatgcagcgatatatttatcacttttagcatttagggattttgagtcataggaagacatctcccttcgtgttttcttttagaacttctatgatttatattaaaatccttgatcttttctatatataaatgcagcttttctcattatttttaataatgacttttaagagctacttgttaaaagcaaagttgctatctttattgggttgaggtaaatttatacatttatttataaaagctgatctttattagttttggatttggtttgttcttgcttttctacttcttcaagatgcatcattaggttatttatttaaagtttttctttttttgatgtaggcgcttatagctgtaaacttccctcttagtactgcttttgtggtatcccataggttttggtatgttgtgtttccattatcatttgtctcaggaaaattttcagcttccttcttaatctcttaattgacccactggtccttcattaacgtgttgttttatctctctgtgtttgtataacttccaaaattcctcctgttattgatatctagttttattccacagagaagatacttgatatttcggtttttaaaaaatgttttaagacttgttttgtgacctatcacgtggtctgtacttgagagtgatccatgtgctgaggagaagaatgcgtattctgccgctgttggatgaaatgttctgtaaatatctgttaggtccatttggtctacagtgcagattaagtctgctgtttctttattgattgtctgtctggaagatctctccagtgctgaaagtggggtgttgaagtctccagctaatgtattggggtctgtctctccctttagctctaatattagcttcatctatctgggtgttccagtgttgggtgcatgtatgtttcaaattgttatatcctcttgctgaattgacccctttgtcattatgtagtgaccttctttgtctcttcttacagtttctgtcttaaaatctagtttgtctgaaataagtatagctactctgctctttttggtttccattgacaatggaatatctttttccatacttttattttcagtctgtgtgtatctttataggtgaaatgtgtttcttgtaggcaacaaatcattgggtcctttttttttttttttttttttacaatcagccactctatgtcttttgattggagaagttagtccatttacattcagtgttattgctaagcagggacttactcatgccattttactatttgttttctgattgttttgtggccctctcttccttttcttccttcctgtcttccttttagtaaaggtgattttctctggcagtgtgatttcttgctctttttatgtatttgttgtatttattatttgaggttaccatgaggctagcaggtactgccatataacccattattttatgccattaacaacttaaccctgctcgcataaacaagcaaaaagaaaactaataaaaactacacctttactttgctcccccactttttaactttttgtttttatttttattgtactgtttatgttttgaaaagttattatttttgattggttcatcttttagtctttctacttacaatgagagtagtttacatgcatcagctacagtgttatctttttccgtgtacttcatattaccagtgagttttataccttcagatgatttatactgctcattaatgtccttttctttctgcttgaattactccctttagcatttcttttgggacaggtctggagttgataaaatttctcagcttttgtttgggaaagtctttatttctttttcatgtttgaagggtattttcaccagatatattattctagggtaaaagtttttttccttcaacactttaaatatgtcatgccactctctcctggcctgtaaggtgtccactgaaaagtctgctgccagacatattggagctccattgtaagttatttatttcttttctcttgctgcttttagattctttgtctttgacctttgggtgtttgattattaaatgccttgagggagtcttcctttgggttaaagctgcttggtgttggttgtataaccttcttgtacttggatattgatacctttctctggtttaggaagttctctgttactacgtttttgaataaactttctacccccttttctctacctttctttaaggccaataactcttcgatttgcccttttgaagcttttttctagaccctgtaggcatgcttcacgattgttttttcttttttctttcctttcctctgactgtattttcaaatagcctgtcttcaagctcactaattctttcttctgcttgatagattctgctattaagagactctgatgtattctttagtatgtccgttacatttttcaactactgaattgctgcttgatttataaaattatttcaattctttgttaaagttatttgatagaattctgaattccttctctgtgttatcttgaatttctttgagtttcctcagaacagctattttgaattctctgtctagaaggtcatgtatctcctgtttctccaggattggtccctggtgccttatttagttcatttgatgaggtcatgtttcactggatggtcttgatgcttatggatgtttatcagtgtctagacattgaagagtcaggtatttattgtagtcattggagtctgggcttgtttggatccatcatttgtgggaaggctttccagatatttgaaaggacttaggtgttgtgatctgcattagggggtctcatgaccctgactggtgccctatgctactgtggctgagctcgtatccaagatggaaaacaaagtcctctccactcttccctctcctctcctctcacagaagaaaggggtctcttttggagccatgggctgtgctgcctgggcctgggggaggggtgatgccagtacacccttagccacaccagttggtgtctcagtaggtcacatgcccctacagtccactggctccaagcccagctcagcactaggagttgccatccttgtggcctagactgcccgtcaggctcacctagggccccagagcactttagcccatagtggcaaggcttgtcagagctcaagctcctgctgctaagatgggcgattcccctcacaccaggactagtccaaatgctccctctgtgtgtgggcatcagtttagttcagcctggttctgctttccactgttacaggacagcactgaattcaaagcaaagcttcaaaatcactgtgctctcctcccaagagcacagattctctgtgccacgcagccactgctgggagatggggaaggggtggtatcagcgattgtagactctttcctaccctcttcagtgcctctttcagcagtgggaagtcaaaaccaggcactgtgagtactcagctgacttttgtttcctgtgaaggtgttccctttgtgtagatagttgttaaacttggtgttcctgcaggggacaatcagtggagccctctgttcagccatcttgctcctggctgtttcctctcctgtttttttctttatgtgtaggtgattctgctgtcagccccctcttctccggccctctcttctccatccaaccccagttcacgctcatggttttaactacctgtgtgccaccgtttctcaagtttcttgtccagcccttctcctgagttcccggatgttttgcacattggccgtatttctctaaatgcccacaggcacctcactcaacaaaggcaaaactgagcttcatccttttccttctcatctagtgtcagtgaacttctttggtgttctctaggttaatagtcttgccattcacccactcccctccgatccagcaatctgggcaatcagtcttggtttgttctgtctggccagtcctatttttctggcccgtgactgccttgaaaatccgtttctcctctccacacccctgccacctccctgtggctgccatggtttggggacctcactctcaccagcgttcctgcggtagtttcctgtctggcctccttgtcccttatgccagctctctctggcctacccgcccatacaccttccagagtgatcttttgaaaccccagtctcatctcactcctacgtccacctcctggtagggctcccctttgcctgtatgcatggcatagagggcccctgtgccagtttggatcctggggtgagtagacactgaggcagttaggaatggaaggggtttattagtgttacctgtgaagggtaaagttggaagaagcaggattgggcagaggtggcctcagactgcactgcagtgcctacggttctgaacaacccactgcggagctctggaggaatgagggctgttaaaaggaggcctggcctgtattgggcagaaacgtcgaggccccagacccttgctgtgcttacttgttggctagagactgcccacagctgtggcctctgcccagctgctgcagtggatccagaaggcgctgcagtgggtgcagaaggtgctgcagctggaggctggcactgaccataggagatccatgcagcatgcctatgtgggtgccctgcagcccgtcagtcatagcctttgactcttccctagcgttcgttattttctcttagaaaatacattctatctgtgctctgttgcatgtttcttgaacatgctgggctgttttacaccaccaggcttttacattaacttttccatctgctttaaatgtccttcttcacacttgttttcctgaaaaaggtttttttacctgtcagcgccaagtgtcataactgtgatgcttttcctaataccccagctgtgtctccacatcatcttctctgtcagatgcttgccaggtcatcactctgcaccatctttggccttcccactagacagtgaaccctttgaaggaaagcctctcaattttaaagtaattttattcactgtgctttgcattttgaggttggtgttaaataaatttgttgtattgaacagaatgaaaagatgagttttcatctcccatcagaagttagggctatttttttcctctttaaaggataaaagaaggtgttcccttttctgtcacctaaggatgggcctagtggattagcttttagtacaaatgatggcccgtattcctgggactggtaacttggagaaaagtgcagttctcagacatcaccacaggtgctgcagtaatggaacaggttacttgcttgcctgggataaactcatgtggcctgggtatgggaagatgtgggaggcagcagtaaacccaggaaggtggcagacttgtatgtgacaaataggatatttcctcattaaattgagtctgttttcatgttgaatgagcaagttagagaagacatgtgaatataaatggaatgtgtacaagatattgatggcttgtactttttacagttcagacacttctggaaatgaagcaagtgaaatcgaatctgtaaaaattagtgcaaaaaaggtatgtaggagtattcactcttctactttaatttgtaatatagtttgattggatgcaagtacagaaaatgttctgtaaaatatttcatttcctctttagattggatgcaaatagagaaaacattccgtagcaccatttttcataaagttctatttttaggatatacttttatagtaaaaaccaaaatatttttgtaactgaagtgtttttcattaaagaggtctcacatctctatgtactttgtcaattttcatagcattcttgtactgtggttaggttgtgattttaaaaggcagagtgaattgctgggagtgattattgtaacctttgatttaggtttcctgtcctatccactaattaagttgccgtcttcctattatgttcaattttgaagtgtagaagtgagaaatgtggactatatatatggttttctactattacagtaagaattataagcatttctattttctacataagtactgctgttttttctttcacacagccaggaagaaagctcaggcccattagtgatgactctgaaagcattgaagaaagtgatacaaggagaaaagttaaatcagcagagaaaataagtacacaacgtcatgaggttattcgaaccacagcgtcttcagaactttcagagaaaccagctgagtctgtcacttctaaaaagacaggaccccttagtgcccagccctctgttgaaaaagagaacttggcaatagaaagtcaatcggtaagaacgtctgccatcccctaggagggcaaaaaaagtttattgaaaaattttggggaagaaaatgaagcattttctctttccttcagatcttttcaaagataaattttatattttccttaatgtaataaagatgtttgttttagaaaatctagatggtatggccgggcgaggtggctcatgcctgtaatcccagcactttgggagaccgaggcagggggatcacctgaggtcagaagttcaagaccagcctgggcaatatggcgaaaacccatttctactaataaagtacaaaaattagctggatggagtggtgcatgcctttaatcccagctactcaggaggctgaggcaggagaattgcttgagcccaggaggtagaggttgcagtgagctgagattgcgccattgcactccagcctgggtgacagagcaagactccgtcttaaaaaaaaaaaaacaaaaaaaaagctagaaggtatggaaaagaagataaaatcatctgtaattccataacccaaaataaccaccatgttttttggtctatgctgttcagtcctttcagtgagctttaattaccctaagtgagatcatatacttattattaagtattcaacaatgcataacattccattcatggatatgccatagttaatctcttactaatcaagaattgctatttaaaaaattataagtgctttgatgaattttgttgtagctaaatatttgtgcattccttagatcatttccttagaaaaaaactgctgataagaattctgggtcttaggcgggcacggtggctcatgcctgtaatcctaccactttgggaggccaaggcaggcagatcacgtgaggtcaggagttcgagaccagcctggccaacatggcaaaaccccatctctactgaaaatacaaaaattagctggatgtggtggcgcgtgcctgtaatcgcagctactcagaaggttgtagcaggagaatcaccttgaacccgggaggtggaggttggagtcagctgagaccgtgccactgtactgggcaacagagtgagactctgtctcaaaaaacaaagaattctgggtcttattggtgctaaaattcttgacatataatatcttttggtcaagttcttaatatgtgattaattcatttgggcttaattgaataaataatttatgctaatgtttgaaaactttttgaagtataataagttgtccctgccaccctgtcttcttcacctttccacctgctaaacatacacacaggtaaccgtatagtttcttatatatccttcaaatttccttttgtacatgtaaacaaatatgaatttttttaatttttatttcctgtctttacacaaattgaagcaaactatgatctctgttgttgatctgtcttggtgaacatcccatgtgcacttgtgttctgtaaatgtcagttgaggtcaagttgattcagagtgtagttcagagatttggtctccttacttactgttttgtttttggtgatggggcatggtctgcttgatctatcagttacatagaggaggtatttttttaacttctgctaaaagtccattgacttttgatgtaattttaaatatggtgaggtttacatctaccatactgtgttttccatttgctcctattttctctttctcttagaactcattttgcattagttgaatgttgtttttgtattccattttattttctctattggcttcttagctataccttttaaaatttttttcagtggttgctcctgggttaaaaatatacatccataaattagcaaagtctctttagaatcagtgtgttatcacttcatacattctacttaacaattaactaccttccactacatacatgtaattacataacaatattatgtataattctatttatccatccccatcctctgtgctgttttgtcatatgttttacttctgtgttacaagtctaaccttacggtattgtcatttctgcttgaaagagttgtttttttaagaaaagtatgagaagcagcagctctatagtcttttacctgtccctctctccagttcactgattgcctgcctgtagatactagtttccatttgttatctttttccatcagcctacagaatatcttctagcatttctttcatggcaggtctgctggtgacaaattctctcagattttgtttctctggaagtgtttttatttcaactctgtttttgaaggatatttcactggccgtggaattctgagttgacagatttatttcccagctctttataccattctgttgtcttctggttgccatggtttctgatgagccgtgagttgtctctttcccatgtacctttaccttgtcctgtgcccccattgctgcttgtcctttgttatcagttatgttgttatccccatgatagtgcttctggtaggctttatgtggtctcaacctggcacatgggcagtactcagacaaggactcttaggacaccccccacaggcacctgtgctctcctgagcagcttattccaggtgcctctcagctgggtaggattgtcatgccctgcttagacttcagctcactataccccatctagaaattgtatgtgtgtggagtgggggtggtagtcatggggttcaccttccaagtttcccctttctccaggaactcagtcttgtgttgcctactgtccagtgcctgaataaaattgccacccatattcccccattttatggttgtttatggcaagagagctagtttggaagctgttacttcaccatagctggaacagaaatttgagctgattccacatgttgttatcttaagtaataaaagttcagcttttccatcaaggcaacaattgttaaaagtcaactgaaagttttattttctcttattttgtgatagttttgtttgcaatgcttccttgtattactgtagataatttatgtaactaatctgttttagaactaaatgagaattgtagctaaagttttttttcttcttgagacggagtcttgctctgttgcccaggctggagtgcagtggcgcaatctcagctcactgcaacctccgattcccgccaggttcaagcaattctcctgcctcagcctccccagtagctgggactataggcacgcaccaccacaccctgccaatttttgtatttttagtagagatggggtttcaccatgttggccaggctggtctggaactcctgacctcaagtgatctgcccgcctcagcctcccaaagtgctgggattacaggcatgtgccactgtgcgcagctaaaatattgaatgacagtttggtgacagtcttaatcctaatgttttaagagaaagaaaacttttcttaaaaacttaatgctttttttttttgtagaaaactcagaaaaaagggaagatatctcatgacaaaaggaagaaatcaagaagtaaagccataggctcaggtagagaatgatgttttatactttgtcactcattcaggaatttcataagagaaataagaccctattcttaatttgttatagtagtaaattgtaagtacataaaattgccacttttaaaaattaggaatatgtgactttggagtaacatttttttctaacgttttgtcatgaaaattttcaacatgcaactaaggtgaaaaaaatttatagtatatattcatatacccactacctagattttacagttaacattttattatttactttattagataggtagtaaagcaagtattaatccattaatccagtttttaaggcattttaaaataatgtagacatgagtacttcctctggaatacataagtatgcacatgattaactggagttcagtgtgtgtttacagttttttctttgaatgtaaaatgtacatacagtacaatgtgtaactcaagtcactgtcaacatgtaaagtctttactccagaaagttcccccatgcctctttcatgtcagtccccaccccattatctccagaggcagtggcttcagggatgctttttctgcccatggattagttttgcctgttctgggattttgtataaatggaatcacatagtgtgtactcttttgtgtaaggcttctttcactcagcatagtttttttgcaatccatctatgttgtttggtgtcatttttattactgagcttattccattgtgtgattacactacagttgatccagtctcttattgatggacaactgagttgttttcaggttttggctatttgaataaagctgctgtgaactttttttttttttttttttgagactgagtcttgctctgttgccaggctggagtgcagtggcttgatctccgctcactgcaacttctgcctcccaggttcaagcgaatcgcctgcctcagcctcctgagtagctgagactataggcccacgccaccatgcccggctaattttttgtattttagtagagacggggttttaccatattggccaggatgatctcaatctcctgacctcatgatccgcctgccttggcctcccaaagtgctgggattacaggtgtgagccaccgcacccagccagtgaacatttttatacacatttttttgcgaacgtatgttttcatttctcttgggtaaatgaaaaggagtgaaattgctgagtcatagggtaggcatatgttaaattttacaagaaactgccaaactttgcaaactgcattcccaaagtggttgtataatatagttttatactcctaccagaagtttaaatgtttaagtgcacagtttaaatgttgctaagaatataatgaataacttcatgtgaataaatttaaaatagttaggggaggctagtggggagcaggggagagggggaggctggtcagcaggtacaaagttagataggaggtataagttcaggtgttctgttgcacagtagggtgattatggttaatattacacatttcaaaacagctaaaagaggatttttagtcttcttaccacaaacaaatgataaatgtatgaggtgatggatatgctgaataccctaatttgatttttttacacaatacatacatgtattgaaacatcacaccatacccataaatatgtacaattactatgtgtcaattaaaaataaaattttaaaagtgaatccacccacccccctaaaatagaggaaaaggagatattaaagaaggaattaattacggaagaagagtagactatcctgccaatggcttatgttaacatacagaaaattgggggccgggcatggtgggtgcacccgtaatcccagcactttgggaggctgaggtgagagattgcttgagcccaggagttcaagaccagcctgggcaacatagtgggaccccacctttacaaaaaattttcaaaactagccaggcatagtggcgtacacttgtagtcccagctgcttgggaggctgaggtgggaggatcacttgagcctaggacttcgaggctgtaatgagtggtgagcgtgctactgcactgcagcttgggcaacagagtgagaccctgtctcaaaaaaaaatttttctaagaaaaaaaattagggtatgctttgcaaattgataacaccttacagatgtatagtaatttatagtttttgtaaatgcattcacagatattttcttgcttgagtctcaataaaagggagagcattgttttattccatttatcattgaggaaacagcctctggaaggttaaatggcttgcctgagatcttagactagtaagaaagaagctcaaactagaaccaaggtcttcagattcctgtctggtatattactgtatattactacaattatttaaattaatacactgagtaatcttgctgtatcctacaagtggcctatcagatagattaaaattcagaaaatacagctaacaatgaagagcttatccccagtaatgttaaataacagcacaatactaaataaagatgcagtaaggtgattaaaaggcagcaatgcttttggttgctttagcagaaataggagaaccagcgagacagcagttagagtgaaagtgtatgtaggggtttgcgagactgtgcacagggataagaagtgagtacggcacctcctctctgattgttcagctgtagctatcttttacaatttggtgagactatttttgtgtcaggctttcagaaccctggacctacagccaaaatatgaataaccagcatgttaacttatcttaatattttagatacttctgacattgtgcacatttggtgtccagaaggaatgaaaaccagtgacatcaaggagttgaatattgttttgcctgaatttgagaaaacccacctagagcatcagtaagtcttttgatgatgtgctatatttacctaataaatttcccctgaagcaccatttttgctcatcctacagtttttgttatgtactattttcattgtcattgttttagatatttttacattttattataattttttctttaattctttgaagaattcatatgtttttatttgtcccaaatatgtagacttttaaatttatatttttgtattaaccttctatcttaaatatgttgtggtcaaagatcatggtccagtgatacctttttttttttttaaattttgaggctttcttcatgacctggtacatgatctgtgtggaatttctaatcattagatctagatagaatctctaattattggatctatgttcagtttttcttggtacttctattcatttgtgctgtatatatttagagactattaggaaaatcatgtttaaaattgctctgtcttgcaaattgaacattttagttggtcacccactctattcctaaacatactttgtcttaaaatttattttacctgatactaatatgcatcatagttttcttttgctagcatttggcagattttttttttttttgagatggagtctctctctgtctccaggctggagtagagtggagagatctcggctcactgaaacctccacctcccgggttcaagcaattctcctgcctcagcctcccaagtagctgggactacaggcatgtgccaccccgcccagctaatttttgcatttttagtagagacagggtttcaccatgttggccaggatggtctcgatctcctgatctcgtgatctgcccacctcagcctcccaaagtgctgggattatagacgtgagccactgcacccggccagattttacattctttttaatttcttttacttccaacctttttgcgaccttaaattttaatttccttattagtctttttaaatacagtgtatcagtctttgaatttcaactgtttagtccattaacatttattgtaatatcgatatatcttgaacaatatgttgatatattgttacttctttaacttttttattctactttttgatgttctgaattttttttaacttaaaaaagttgtatttataactccccacctttaattctaaattaaggtagatagaatttccccttctgttgtgtgtgtctgtctctgtttttaagacaacaacaaaattcacttaggtatttgatcacttttatctcatatattttcttgcaatatcctgtagataagtattttctcatatttaagcatttcatccaacacctcagtgtgactctttatgttgcaaaacttctaaaccttctgattattttgattatacccttgaatttgaatgacagcttagctggatataatactttaggttctaaattattttcttaaatactttggaaactttgtattcttttacatcaagtgttgcttttggaaaatttgatgtctatctaattcttatttctttgaatgtgatctgttctttagctctctaaactgttattttttttctttgatattcttaaatttcactatattgagtctgaccttttcattccaaggttttttaattttttatttttttattctattgctgctgaacaaatttttttaattctaagaatttaaaatatttttatcctgattttcttttttgttctcttatcctttgcttcattcactgggagatttcctcaatctaagaaattagatttgctaatttattcttagaaatatccattctgccatttgtcccatctgttgagttctttatttaacttagcttttatattaatatttctgcttttttttttttttttttttttgagatggagtctcactctatcacccaggctagagtgccgtagcgcgatctcagtccctgcaacttccacctcccaggttcaagcgattcacctgcctcagcctcccaaatagctgggattacaagcatgcgccaccacgcccagctaattttttgtatttttagtagagatggggtttcactatgtcggccagtctgctctcaaactcctgatctcaagtgatccacccactttggcctcccaaagtgctgggatttcaggtgtgagccaccgcgcccagctatttctgctgcttgctttgtgtcttgtattcatgttttatgctgctaatatcttccttagaatatctgttgggctaatttcaaattactggatcagctattctaaaatacctgcttctggtaaggtttcggatataatatgtgttttccgtttgaaatagttgggttcctccagcatcctgttattccagcctctgagcttattttcccctgggcctgtcagcttctgtcagacagtatgtatagaagaaggccaaaccccagtccctgttagtgcccgtcagtgcagggggtggggtaagccctaggatgggcagcctcagcgactcatctcacaaaacagcctgtcaggtcagcacttcactcctcgccctccagagaggagcagcaggaagaaaagatggactctgggtcatcattctccagcatgggggtttggctggggaagggtgaggaaacagctgcccaaagtcagtcagcctcccatgtttttctctaggccccacaagtccaaccccagtttcagtcttgaggacacagggacagaggtctcagttgctgcagggggcaggggagcgggggtgagcaggcacactattgatgagatcggtgatgggaagaggcaggagtcagtttcctgcagctctctattcctgccctggccacagcgccactccttacagcagttattctctctacatgaccttcccctcagggttttcacagctttctccattttcttggtattccctctgtagttctgggtgagcttggggaaaggagccagcctgtcatgccaactcatcattatcattgtgagaagtgcctgttttactcttctttatattccagagccagtttcctgttaaaactaggacagttctgttaacacacccaagaccatcttgcttgtgttatcctttacctattcacaaatctcttataggaagcttattatagacttctgatgttttagggaaaatggcattgtccccttctaaatcatttcttatatcaagaacttaccacccagtgggtagtaaggacacagggacagaggtctgagttgctgcagtgggtagtaagttcttgatataagaaatgatttagaagaggcatagtattttttcttagacttattgcagtacaaccttgtgtttttgtcataccaaataagaattctggtgaatcactgatctcattttgtttccttgacaatatggtgttctcagccacgtgaaacacttcactctttcaaaattaagtcaacaactgtttaagggtctgtttgtaatatcctgtacctagcactcacacctgaatagcttcactgtcatatcagtatgaactgatgataagcagtttatgtataagtagggaagtatgccatgaaatgcaacattacaaactcttagaatattctatagctgattcaattaattgaattttgccagatgttttaagttgctagaatttggaagagctgtcttgtgtagaccatcacctttgtgattgaaagaatccattgatttatcattacaagccatatgcagagaggcctgaccagtttttcttatttaaaaaacaaaacaaaactttctttagatggggggtgtcactgtgttgcccaggctggtctccaactcctgggtttaggggaccctcccatctcagcctccagagtagttgagattacaggcatgtgccaccatgactggctatattttaaaaatattttaacatctgaaaataatgatttgatattatattacattagaaattcttttttttaaagtggggcttatgtaaatttttaattgtgctaaaatacacataacataaaatttgccattatgcgtttttaagaacacaggtcaatagtgttaagtatattcacgttgttgtgctatcagtctccagaacttctttatcttgcccaactgacattctgtacccgttaaatcacaattttctattctccaccccatctccagtgcttggcaaccacccttctactttctgtttctatgaagttgactacttcgaatacttcacggaaatgaaaccatccagtatttgtctttttgtgactggcttatttcacttagcatgtcctcaaggctcatctgtgtgatagcttgcatcagaatttccttctttgttaaggctgtgtattgtgtatatacagataaccattcctccattcattgtttatccattcattcatcagttgacacttgggttgcttccacctgttggctgttgtgaataatgttgctatgaacatggatgtatagaaatacctcattattcatgaatttttttgttcaatgtgtaataacaagttacaacttttttttttaattaaatgtcttcttttgagataattgtagaatcacgtgcagttgtaaggaataatatagggattttatcatatgcataggtttgtgtattgcatcacctccaggatccttgtgttctcgtgcccccgctgtcttcatgttgcccttttataactacacccacagccccaagccctggaaaccactaacccgttctccatttctatcatttcatcatttcaggaatgttatataaatgaaactgtatcgtgtgcaaccttttgggattagcttttttccactcagcataatgccttggagattcatccaagctgttgtatgattccattccacttcattgctaggtaacattctatggtatggatataccatggtttgtttgacattcacccattgaaggaatttgggttgtttccagtttggggctgttaacacacacagtgctgtaaacatttggatacatttttttttgtttgaacctgagcttccatttctctgggataaatgcccaagagtgcagttgttgggttatatggtaattgcatgtttagttttgtaagggactgagactgttttccacggtgtatgatcttatttatgatccagattctctacatccttgccagcatttggtgttctcactaatttttattttagccattgtgataggtgtgaagtgtagaaatattttctttttattgtgtgttaactgtgtgcaacttgttaagcagcccatctctagaactaaagccttaggaaacggtagctttgtacccattcgagcaatgactcctcattcctccctcccccagcaatcaccattctactttgtctctataaatctaactgttctgggtacctcatatgagtggaatcatacaatatttgtccttttgtgactgtcttatttcactcagcataatgtcctcaaggctcacccatgtcatagcatgtgtcagaatttacttattaaggtggaatcatattcagtcatgtatacacattcatgtcacttaacaacggggatgtgttctgagaactgcatccttaggcagttttgtcattgtgttaacagtgtacttaaaccaacttagatggcatgtactaggcttaggtgtaagcctagtacatgccgcggctatatgatgtgttgcctattcctcccaggatacacacttggacagcatgttactgtattgagtactgtagataattgtagcatgatggtaagttgtgtatctaaacatagaaaaggtacagtaaaaatacagtataaaagataaaaaatgagcctgggcaacataatgagacctgttttctacaaaaaagttaaaaattaggcgtggtggcatatgcctgtagtcccagctacacgggaggctgaggcaggaggatcactggagtcaaggagtttgaggctgcagtgagccatgatcacactactcagtccagcgggggtgacagagtgagaccttatctcaaaaaaaaaaaagatgaagtatgttacacctgtttggggcacttagtaatttattacctagtattatgtagtatacctaagtatgtgtgctatacttttacacagctaggcaacactataggtttgtttacaccagcatcaccacaagtatgtgcataatgcattgtgctatgacattatgatggcaacagtgtcactaggtgattagaaatttttagctccattattgtcttatgggtctaccactgtatgtgccatccatcgttgactgagacattgttatgtggtcatgattttaacacatttcctttatccattcatctatcaatggacacttgagttgttcccaccttttggctattgtgaataatgctgctacaaacattggtgtacaattgatattcaagtccgtgctttcaattcttttgtgtatgtacctagaagaggaattgctggatcatgtggtaattctgtgtttaattaatttaatttatttatttttttggaactgccaatactgttttccacagtgactatatcattttacatttccaccagcaacacaagggttcctatttctgtactttctcaccaacacttgttgttttgtttttttttaataatagccatcttaatgggtgagtgagccaagccaggagaatcagagcctggccaccagatctcttctccccagtgacagagacctgaggcagtttctttgagtcagctttatagtttctgaagaactaacacctgatttatggctactttttggctagtccagatgtgttacacagttgctcctccttttgctaacaggcaaagagggagggaataaagtctgctgggtctatcagttagcagaaaaagattgggagtatccataagcatttctaccttacttggtatcacctgtgaggttggtcagtatcagggaattaagatgaccccgtaccagagggcttagggaataatatgtttgttctttttcttttgctgatacatgtttccggtgtttttttcaggctgaacattgccatcttagttatttaaaatggtgctctcatatgttcattgcagcattatccatgatagtaaagacggaatcaacctaagtgcccatcaactgtgggttggataaagaaaatatggtacatatagaccatggaatactacacagctataaaaaagaacaaaatcatgtcctttgcagcaatatggatgcagctggaggtcattatcccaagtgaattattgcaggaacagaaagccaaataccgcgtgttcttacttataagtgggagctaaacactgggtgcacatggacataaagatggcaacaatagacactggggactcctagagggaagagagacagagggattcaaggactgaaaacaacctgtttgctactatgctcgctacctgagtggtggggtcagttgtaccccaaacgtcagtgtcatgcagtatgcccatataacaaaccccttaatctaaaacattgagattattaaaaataagagattaaagatatttttaaaataaaaaaaggtatatgccaaattgtatgtgtatgtttgtttgtatgctaagcaaatgaaacacctttcaaaatccatcatggtacttagacttttttttaattcctctacagacaaagaatagaatctaaagtttgtaaggcagccatcgccacattttatgttaatgttaaagaacaattcatcaaaatggtaagctcacggacatgcatttgttggtctaaggtttttttcactaatcctgtagcagcatattgttgtcttagaaaagcttgcatttgctggcagtatggtaataaactcattagaactattcatattccacataactgtttttaaactaaatgtgacacatgtgaaactaattaacatttacttttggaaactgatgtacatgtgtattttttgttttgtgtagcttaaagaaagccagatgttgacaaatctgaaaaggaagaatgctaaggtaaattatttatgtgattagagtcatagagtcaaacacaatactaatgtagagttatgcgaagacttgactctgggtttacagcctttagagtgtgagtagatttcataatcttgtcaggcttttatttggttgatcttgtggttgatacggttggtattattaatgcaaggtaaggaatggggatcctagtcacttttgtttcctaaggctgcacgagtgtcaaaataattgtttttataattaaagacagaaatttaagccttttattaatgtcacaaaggtagctttaaaaaaactacccagtccaaaatgaccacttacatggataaatattaatatatatttattgcttttgtggatgtcgaaaagcacaaccttttagaataaagaactgtcccaggtaggacagcctgggaagaatactgggttaagggtcaggagacctcatgtctagtcctggttctgctgcttcattgctataccacctataagctgtataccactgggtctgcagtgggtgacaagccagccagcatgagagtctcctttgcttacctggaaatggttggaccaaatgacctctgagcatcagaggtgaatccaggagtggaagtccacctctacatttaaagtagaagtggacttgaaatacatacgttttccttccagtgattgcaagctctgggatgtttttgtttttcagttttaatctcttattggtcatttctgcattgcttattacggagtgggaacattatgaatgtctaacaatggagaattaggtagtcactaaaagtgactgaatgtccgagataataaaatatgaaatatttcttttaaaatacagagtggatcacaacactcccctgctttgatagtttcctagtatgcctagataaaatctcctcactttacaggtcacagggtccagtaaagacctggcccctgctttccttcctctggtcattctgaagtagatacccctgcttttcttttccagagttctctcttcttttcctacatatcacaagctgtaaatacatactgtttctatgtaatgtctgtcttccccattagaccaaagtctgtgatggtaagaactgggtctgtcttgttttccactgcacttcattacctggcagcttatgtggcagtgctcaaacagttacaaattaattttaacacaaatgattgtgttacttagatgatttcagatatcgaaaagaaaaggcagcgtatgattgaagtccaggatgaactgcttcggtaagatactgtcaaatcctgtttgagcacttacctaaaaggatgtaatgatggtgtgtcatttaggggagtgacacttgctgctgtgatgtattaaagccccaggttatcttcaagctccgatactcagtgaaggcagggtatgctgcttagttgccccaccttttgacaaaggagaattccacactgatctatctccacagatttctcagctctggccttaagagatataatgcctagattctagaattcagctgcctgggttgaattctagaatctacacattaaactgcttgaactgcttgggttgaacccaagctctgccacttactggctgcgcaacattgaccaagttatttaatgtcccagtgtctcagttccctcttttgtatataggcataataataatcatacctatacttcacagagtgttgtggaaattaaataagtacatatatagaaagtgcttcacagggacaggcgcacacagtaagtgctgtgtaagtgttgacaattgtttatgttattgtcgaagggtatgccttggagtgacatgcatgtgaatccactcccaagtgtgggccaggtgaacttaccaggccctgcaggccagggctgcccccagtttctggttaggaagactggagtgcacatcagctgtcagcccccaagtgtgttttgaggccagggctgttgtgagagctagaggcttggtagtaaaacagtgctagatgtggtgtctgctcctgagcttaaaaatagcttgagaaagacagtgatattatcagaaaagaatgtgcataatgaaaagttgaaacttttaaaaactcactcaaaactaagttttaaaaaagaggctgctaggccgggcacggtggctcacgcctgtaatcccagcactttgggaggccgaggtgggcagatcacttgaggtcaggagttcaagaccagcttggccaacatagtgaaaccccatctcaaaaatacaaaaattagccgggtgtggtggtgcatacctgtaatccaagctactcgggaggttgaggcacgagaatcgcttgaacctgggaggcggaggttgcagggagccgagattgtgccagtgcactccagcctgggtgacagagtgaaactgtgtctcaaaaaaaaaagagagactgccacaggagtttaagtgggagaaagcagttgtctaatctgttggtttctaaattgagtctctggacaggtgctggcctatggtaaggttttcactgacccaggccaaaataagaaaactaaaggtaaatataatagggaaagctaacatttacaagcttcctgtgtggcagggcactttcctaaacgcttcctatgctaactcatcatcatcacagtcctatgagataagtggttatagctacagtcaggccgtgcctggttacacttgtcttcggtgtgagactactgagacaagtttattttatttatttatttatttatttatttttgagacggagtctggctctgtcgcccaggctggagtgcggtggcgctatcttggctcactgcaagctccgcctcccgggttcgcgctattctcctgcctcatcctcccgaatagttgggactacaggcgcctgccactgtgcccggctaatttttttttgtatttttagtagagacagggtttcaccatgttagtcaggatgctctggatctcctgacctcgtgattcgcctgccttggcctcccaaagtgctgggattacaggtgtgagccaccgcgcccagcctgagacgtgttttaaagactgacttttgtttcttttctagatataaatttagaaattgagaagtgtattttgaaaaggcataataaaaaaacctatggtatataattattttaacttgccatatgaaaacctaaggcacagggaggtaacttgcctacggtgcagccctaggaagtcagggagccaggattcactgtcagctgactgactccaaatccagcactcctgaccatggctgccagttcagtagtgagttttccccagcgctgcatttgttcagtgtaaagaatcgttaaagaagacttttcctggctcacgcctgtagtcccagcactttgggaggctggggcgggtggatcactgaggtcaggagttcgagaccagcctggccaacatggtgaaaccccgtctctactaaaaatacaaaacttagccgggcgtggtgtgggcacctgtaatcccagctactcgagaggctgaggcaggagaatcacttgaacctgggaggcggaggttgcagtgagctgagatcacgccactgcactcccagcctgggtgacagagcaagactctgtctcaaaaaaacaaacaaaaaagacgtttttatgaaattatattagagaattgtgttttatatctttatttggcaaaatacaaaatttgccgcctttgcccctcatttttttgttggtccataaaacccaagttatccctttttattttatagatgaagaaactcagccactgagagatgaaacagtttgccccaagtcacacattttcatccaggcactgacagtcttccactggttttattagactttggaaagtggacaagatttgataagaggaaggagcactgggaaggctttttctccatggtttctgtgttagactgtagtgcctggctccgctggtgcgagcctctgaatgtcaaccaggcatacatttgatccagtagttcccaagacttgaacggcttgatgaatttcagcatttataaggaatattcttctgtggatatcactgctaattattcattgtgcattgtatttcagagattttttttcctacattttaaactgaaacccagaatcttttacacattcgtagtttcagagccaaagcaagtcatctagttggccagccccggttcttcacactcgctcagcgtacttacaacctcagtttcaccacgataggctggtacattttattatttgtcacttatttttgttttaggttagagccacagctgaaacaactacaaacaaaatatgatgaacttaaagagagaaagtcttcccttaggaatgcagcatatttcttatctaatttaaaacagctttatcaagattattcagatgttcaagctcaagaaccaaacgtaaaggaaacggtaactccaattttactttttaccatgcttcagaagatgattgtgggagggcattttcatgctagagtatcagaagctttggggaaagacaaatgcagatacagaattacagagtccacctaaaatagtatcactataagccagtgaaacttcattatatcagcacttttcttagctacttaatgaaggctggaggagtaatgtctagaattgctgattgtgtaaggtattttcactcggacagctgaatttcatcaagggaagtttttattctgtgtataaatctcaattgaaaaatcacactctgctgtattacagttttcattcatgtaagaccactcagccatgttcgaaagaccagcctcttctgtttggtctagcccatgttcacggcatcttttgcatatgaaaaacaagctattttcccgtataagtggtaggtaggattttagaagttaagaaacaggccgggtgtgatagctctcacctgtaatcatagcacttcgggaggctgaggcaagtagatcccttgagcccaggagttcaagaccagccttgggcgatatggtgaaaccccatctctactaaaaatacaaaaactagccaggtgtggtggtgtatgcctgtagtcccagctactcaggaggctgaggtggcaagatcgcttgagccctggaggtccaggctgcactgagctgtgatcgcactactgcactccagcctgggtgacagagcaagactttgcctcaaaaaaaaaaaaaaagttaaggaacattaaaaaggaatataatgggaaaacaagtttattgttttaatacattttgtagttgcttctggatttttactgcagactttgctactgttatgccatctgcctcagattaatagaaatgtttaagttctaggaaagaaatttgtatttgtatgccctaatataattttatataatatatatatatgtaatgtatacatattttatgatcagatttgtattcacttctaaattcaatgttaaggttttgacactgatctaaattaattttcctgagcctaaggtttgtgtatatattagagatccagaaatagaatgcttttaaaggtatttttttaattacctaagtagtccaaagcttatgatttggagtttgttactaaatttgggcaagttatctgtagcattgattcagcttgaacataatactttggttaaaagcgaggtttagtgtctctgccttgtttggaacacaccacctgatgagcgtcctgttcttagagtgagctcaatgccttcttgcactcctcttgtattaactgtcccttttgccttattaagtgtagatatttgggcatatgtcttactctaaacatttagtgacaaatgtgacttcttcccctttattcctccctagagcaggtgcccatgggagcttgaacacattagtttgtcaaatatttgtataaaattccattatcatgtgtgtggtagtcacagcatgacaccttttctgctgtcatcttgaaaacatgctattaaacagcaaactatcaaagtatgacaaaattctgtaagaggaatttaatcatgcacccttagatacaatttgcaactggaagtttgactttgttaattatttcaaaatcatgagttggatattgtattttatgttgggtttgtattctaattttaacatgaatcattaagaacatttggattggcagcctttgagacatttaattgattctcccaataaataatttcttgagatgatagatttgggttttcttttttccttaagaacttttatggatctggtgttctcattccattagttatttcagttaaagtaaaacctgtcttacagttttctgtgttttaaaatagacatgatatcaagcagattctacacagcacgagcagacctgcccaaaccaagccttgacatgtcccagatgtgatttcctgtctccagtaatagagatgatacaattctttgaatcagctggtcttctgggataagaagatcagttcaagctttgcagagcagctccctagcaactttgtgatcaattatattctaagggaaatggattaaaaccaattgtcttaatggtcctagttaaaaatgagaggaggagtagttaatggaaagctcaatcaaaatttgcattagtcataagattgggctatctaaggacaaggttatgagtttttgatattgctaattatataattttctttcaacagtatgattcatccagccttccagctctgttatttaaagcaagaacacttctgggagccgaaagccatctgcgaaatatcaaccatcagttagagaagctccttgaccagggatgagaagagcagtctactaaaatgtgcctataggaagactagtctcatgctgttaccttctgaaactgtacctttataaatcaattgttttgcaaagaagttatggcctacttagaatctaaaatttgttattcaaattaaatggctgtgaacaatgttaaatagcatcagtttgtccaatagttttaaaggccataatcatcttttctggttaatatcttgagtaattttaaaatgttgacaccttaatcggtcccaggtatgagctataataaacttgtaaaattaagttgatgtgaacataattttgattaattaataaggcgatttctcctgaatttacaccaaagctaatttttaatgaaattggtttacagaagtaaaaaacaaaaattggaaagcaaagtaataaaacttagtttatataaacaggttgaatgatatatttatcaaatctcacagacatcaggcaaattatagcctggtgacaaaagtgttcatagtgaattagttactcttgtaatacttctataattagttcatcaggaatttcatccacttcactgttataactgagaagactgttctctgcagcttcagctaattcagcatcttcagtagcttctaaaaaataagcatcatcaatgccattatcccagacagcatcagcagatgcacctgttgacagcctgctaggtgatggtttatgaggattctgggtttcattgctcctagtttcatctgcttcatctgttgtaaactcttcttcctttatttcagtggtgaagggatagagagtgggataggaaaatatttactcaggatatgtgatttaaccttatactctatgttgaagtaaggtattaagtgacagatactaaagtgaatatgcaggaggaatgctgtctccgatatctcaccgtgggaatgagtgcactgattcaaacgttgctgcactgaagctcagacacacttgaaactccaaatttgaaattacctacagttctgtgcacatacttttcaatactccccgacggaagagcaagggtggatttaattttttaacaagtggacagtccagctgaagacaaatcagaagataaatttgctatcttgacaatggacttagtacccatgctttaaattttaaagtatttagcaaatcgtaaacatggattgaaaaaagattaaaaacagttgccaaaatat

SEQ ID NO: 99 - DNA, 21159 bp, Homo sapiens
gaagccaacaagaatttgagaactgtaaataccaagccttgaaagggaccatggtgcggcctgtgaggtgggtagttcctgacattcgtcgggggtgggaggaaaactaagggaaaagacatgagactaaggggaaaggatcgagtaagaccggagggcagcgatggtggggttaggatggacggttatcaagaacccagtctccagtgagagccacccgttgctcagaagtatcctagcatcgtagctttttccttctctttgcctcccttcacaaccgtcgccgtttcttttaccaagaccttgttagcgtttgaacagcgctttacatttcaccgagcgcccaattatgtgttattttatttgtttatcactgtagttatttgatatagaaagagtaagcattcctgttgtattgatttaacatttctacgtatagagggtaagttatctgagtcatacagcccagtaagtggcagggcaatactcaaacctaagtcatctcactcaagatcctctgtgctttccatcgtggtattagaaacgattcttctatttacacagttgagtgccatggaagcctatagttagccattcatttaataaagttattgaatatattcacttctttagtgtacgaggtgctggaggttacattccagtgggaggtgaggttagggggccgaaaataagcctcgaaatatgagagtgcgaaagaggaaagcactactttaaatatagtagttaatatgtgactctgaggcgataatgcatgcactgagtcatgaatcagggtagagggaataggagccaaggccccatacttgaccatattttagggacagtctaatgctataggattaacaagcagtggggagaatcgtagggggattaggccagagaaataggcaggtgccagaacagatagggtcttgtaagtcttagaaaggagtttaggttttattttaagtcaatgggaagtcagtggagggttttaagtaggggagaggaatctaagtttgcttttataaaggtcactggctgttggtggagaataaatgatggatagggtgaccagaacgggagcaggaaaatcaggtattatatcattggagagcggtttgggatagggtattattagtgggcatggaatggaacagatgaatttgggatgtatttcggaggcactgtggacagaacttgctgatgaagtagatgtacaggtaagggaaagaaagaatcagagatgactccacaatagttttggtctgagctacaggatggatgatctttgtattaagatagggaagactaggaaaaggaaggttaggaggtgtgagggatcaagatttctgtttcgaacatgctgaatttgaaatgggttttaagcatccaggcagtggagtcataatccctttgtaaggaacagcagttgttaaagtatggtctacagacctctgtgggtccctggaaacttctctagaggtctatgaggtcaaaactcctttcataacaatactaagatatgatttgcctttttcgctgctttgtcatttgcactgcagtgaccccgataaaactgctggcacctcagaacaattaaggcagtggcactaaattgtactactagtctttgcaatgtttactgccatactcttaaaagtaaaaaaaaaaaaaaaaatcatttcagttaagaatatgcttgatgaagtagtggaaattattatattcatcatagcttaacccttaagtatactaattaaaaataggctattgattttattttactattattcaagttcagaatttataaaggggttttcacattttattcagctctaacttctttaactctgaagagtaagagagtaatatgagtgcactttttaatagtttgcgtgaggaaacaggaagtacacataaagcacttctgtatactgatgcgtgatagttatctcaaggaaaagcacttgtgagattgtctgagttgtgagctgagcttactacctctttttcatagaacattctttttacttgaaagaacaaccagctgacaaattaggttattcacatttagccatttgacaaaaatatagaaataaaaactagaaaaacattttatttagtgcctagaggagggaggaaaaaattatttttttcactttgaatatcattttcttctaatgccctctgaagtagtacaagttgagcatcccaaatttgaaatgctccaaaatttgaaacttttgcagtacctacatggcactcaaaggaaatgttcattggagcacttcagattttagattttcagatttgggatgctcagctggtaagtatataatgcagatattccaaaatctgaaaaaatccaaaattcaaaacatttctggttccaagcatttcagataagggatactcatctcaggtggtaggaacaaggtcactcaccatttttaagtgtccgttgcataaaaatgttatttggtatggtggagagattgaaaagaaagtagcttttagtgtcaagaaatttataatctagtaaggaagatagaatgcacacacaaaacagaagaacacgtacaacgggaacttacaaatgcccaacagcaattaaacagtatagcaattataaatgttaattatgtagattattctttgtaagttacctgaatttttttcctttatcatataattgaaaagccaacaatacccaggtatatcaggtatagttgtaactattttagctaatgataaatccccgcggtaaaatgcaaatcatgttttagagttaaatattcttacttgaacccaaacacattttcatttattgaaacacatttcatttaacacatttttatttatttcgtttattcattatttattaataaatgaataatattaaataaataaataatattcattaatagccttaagtaatagtggtgagaaattgacatttgtgttaatgaaaaaattctgttttggtcatagacataagaaaccagtcaattactcacagtttgaccactctgacagtgatggtaagtaaagcttcttatttttgttctaaagatttggaaactcatttcctcggaatttatatgacatatatagctcaaacactgactaaattgcccaaatgcatatgaggtaggtctggaaagatagttttctaatcatttgggataattatgctgataattatactgataaaaattatgttagtaggtgataaatgaacaggccaggtgaaaagtctctttagatctaaactactctaaagtccatagttgcaacatagaggtttgtctcctattccatccctgaagaaggaaaacactgtctttttgagatacaaagatgttacagcatattatataaaatccctattaattgtactataaaacaagaccttgaagaaaggttaggcttatgttatgccttttaagcattagtcatatgtttacttgactctgctatgattgaaaagtttgaggaacattgcattagattatgttatatgttgaagtggatttaatatttctttcttagaccactagagttttctgtaagtcaaatatttagtaagtcttcggtttgaaggaatctgtttttgccttgagcacagccttaactgtatctaccacttgggaaaaagagtgtagagtataacatctagctttttttttttttttgtcatcagtctgtcatcagatacttataaattgccaggtgtgtagtagtaggtggggggagtcctaagttatcttatttttacatggggaagcatataagagacaacaagtattagtgcttgctgagtatgtgatgaagactgcatagaccctgaaagtatgcatatatgtgttgtatacatgtggaaaagccacagcagtagttttacgttgacagtcaagagtagaactacaacagttcagaggattggtaagacagaaaaacctgtgagaaacagtaatggactggaaaagaacatccttttgcaagaaaataagaagttactttggtaggatcttaggaagatcattatggtaatggaaagagaaaatactactattgtaaaaatcctcaaataggagctactttctcttccccccataatgcttatttcctctagcatggttaatgtactaggaataggtaatgggcttttttttctcttttttttgagacggagtctcactcttgcacctaggctagagtgcaacagcgcgatcttggctcactgcaacctctgcctcccaggttcaagcgattctcccacctcacctcctgagtagctgggattataggtgtccgccaccatgcctggctaatttttgtattttttagtagagacagggtttcaccactttggccaggctggtcttgaactcgtgacttcaggtgatctgcccgccttggcctcccaaagtgctgggattacaagtgtgagccactgtgcctggcccaagtaatgggctttgaaaaaagatatttggctacattgtgaagttcccataaaaataatttatttccacttttcaatgtgattaaattctaccaatttttctaatggttttacaggtttttaatcattttttctttgacacttatatgctgtcttaattgcttttgcagtttttagtgaattggtttttgatagactgatatttttaaatataaagggcacaaaaacaaaagtcgaaatagataaatgagagtaaagataaacaaaatactaacaatgatttttaaattgtggaaattaaacaatttgcctagcctataaaaacttgaacacacatggtaatgattttcatttatgaagaaaataatatttttcttttggttttaattcacacatgaatagatgattttgtttctgcaactgtacctttaaacaagaaatccagaacagcaccaaaggagttaaaacaagataaaccaaaacctaacttgaacaatctccggaaagaagaaatcccagtacaagagaaaacccctaaaaaaaggtgagaggtaagacatgcagtaaatatatgacattagatgtgttaattttaaagagacacagattcgaacccttgatttaaattagaacttgggcagagtcataggtcttattttactaggtgcagtcagaaaacaggacgtactatttttttctggctttctgacttaaagaaattcacaaacattcaaggaagtatcattaaatattaagacaataatgattgtagaattcagaagttatgactggttttgacaggacccagcacttatctctgaattcctcaaatcatacgagactactttgttaaaaatgacattagatgacttaagatgattaagacacaagatgacttaatatgaggacagtttttaaaatataaaaccatgtattttcttgcagaaaaagatgtcttctccccatgttgttaagatttatccagcagtgagaagttcccatagtttctagactaaccgtggaattccattagatagtatcaagaggcagaaaggagtgaaggaagtccttagagacccaaaacttgcagtatggagaagagatgggcggaaggggaatattaacaaatggaacatggcatatataatgttttactgccacaagtttctctatgaaaagtgagttagcctggagaaacttacctcatgtcatgctcttttttgcttttcttttttttggtttttgtttgtgagtttcttgtattacattttaaatatatagaaaaaggaacccacacgtgggagaaaatatttgtaaatcagataactgataagggactgtatccagagtatacacagaactcgtaaaactcaacagtaaaaagactaacaacacaatttaaaatgtgcaaaagatttcaatagactttctccagagaagataaacaaataaccaataaacacatgaaaagatgctcaatatcattagctgtgagggcaatgcaaatcaaaatcagaatgagataatacttcacacccactagatgacttaatacaaaagacaaggaatgtggagaaatttgaaccctcatatattgctggtgggaaagtaaaatggtgcagctaaattggaaaatggtttagcagttcctcaaaatgttaaacagagttattacatgacccagcctatgtatgtatccaagagaaatgaaaacatatgcccacacaaaaacccatacatgaatgttcacagcaacattattcataatagctaaaaaaaaatggaggcaatctaaatgtctatctgctaatgaatggataagtaaaatgtggtttccacaaaatggaatatttttcagccatagaaagaaatgacaactgataactgatatatactgcaatatggatgaaccttggaaacatcattctgagtgaaagaagccagatatacaggtcacatattacatgatttcatttgcatgaaatgtccagaataggcaaatccatagaaacggaaagcagattaatggttgctaggaggggagaggggtaaacaggaagtgaatgctaatgggtatggggtttctttttggggtaataaagatgttctgaaattaggtagtgttggtggttttacagctctgtgaatgtactaaaaactgctgaattgtttactttaaaaggtaaactttatgatatgtgaattatatcttaagaaaactgttattctaaaaaaataaattctttaaggtacatctcagtgcttcttcctttatgtaacttttccttatctgtctttgacgttttcttcctcttatactccatagcacttttgagcagcttgaataggactttatagtctgccttttataggataattattagcatgtcttgtttccccaccctcctcctttaattgcagactccctgaaggtacttttagtattccagctagtgcagtgccttgtacaaagtaagtgcttggtaaaatatttgttaaagtctggattgggaggaagagatgtaaaaaaatgataataattttaatttaatgtaagagctataaaatctgctaaaggggagtgggtgaggtcaaggaagagttttaagtggaagtgatgtttgaaccaagtctgttttgggttgagtagggtgtttcccacctggacacagctggtagtaaggtgacacattacaatgaaagggaacagtcattgcaaagaggcacatggtcctcctatttcaaacctcttattctgtatgtaacatgatactgtgacattttaggagtcttatcttatcatcaaaggtctattaatgatgattgtttaaaaacatttttgcgaagttagcaactcttgaatagtaatttggagaaatctcaaactttgctctttagttgagattgatattttgaagaactcattattacttgtgtatctattttaggatggctttagatgacaagctctaccagagagacttagaagttgcactagctttatcagtgaaggaacttccaacagtcaccactaatgtgcagaactctcaagataaaagtaactttattttctgtatatttagctttaaaaccttcttaatgcttttgtgattatttgtttgggtgggccttcacagaggaaacaggtaaaatgtgaatactttgcactataaatagacccatttgcagagaatacgattggatttagttcttaattcagctgcctaaatctcatacaaacagacatacatctctgcttaacacccagaataagcttgagggcacggactgtgagcctcagtgttcgaattatatgttgttgtacagtgaacatttaatttcttcatcaaatgatttgatctgtacagtcctaacaatccatctccattttttccagatcagttaaacataccctaattatggtaatttttattacttacaaaggtcaaaggtattaatttggttagcaagttcagtagacttaagagaatggcttttggatttctctgttgattttctcctttgatttttctggcaatatattaatattctagagaggcagaaatcattattcctgaaaaagatactctactgctaaaatgctttttggcttaaagtttttatgttgggggatattttagcttattatcttatttaggggtatacatggagcttttttctttgtttcttaaatcagtactgcctccttatttatttatttatttgagacagggtctctctctgtcatccaggcaggaatacagtggcatgatcatggctcaatacaaccttgacctcctaggctcaagcagtcctcctgcctcagcctcctgagtagccgggactacaggcatgtgccgccatgcctggctaattttttattttgtagagaggggtctcactatgttgcgcatgctgccctcaaactcccagcctcaagcaatcctcctgcctcagcctcccaaagtgctgggattacaggcgagagccaccttatctggctgcctcctctttaaaaagaaatgaaagtttgattaggaagacttttagtaaccaagaatcaaagaaacatcaaaagagaattatcatgaattacatttaaaatggaggcactgaaattcatctctctcttttaagacattgtagaatgtataaggggagttccttagaagtattaatattataccatttcttattaaataatgcaccttatagcattggaatttaatagtaccaattattatgtcttaaagtcctcttagaatgctttgggtcattttaaggttattataacgattggagagttcttaacgttagtaaaagcatggatttgcctacacagaattgatagtttattgaccatttcctgtatattaggcacaataataagcaattcctatgtgagatccacatttggtcttctgtaataccactgggtaagacactatttttatctccacattatagatgaggaaattcagtcttaggataagcaacttgcccatggtcatatagccagtttacatggtagagcctgaatttaaacatgttagatttcagagcccagacttctaaccatatgttaacctctctgaataaaattattgtgccagttggagtttgggatcatttatttatatctaaatgctattacattttagtactaattttcctatatctagacattgattaagatatatctgaattttctttcttattccttatatttaggcattgaaaaacatggcagtagtaaaatagaaacaatgaataagtctcctcatatctctaattgcagtgtagccagtgattatttaggtaagttttttatattaataatttttctcatcaacaatgctgtttctctgacttttgtttaaattgctgaaattgtggctagaagcaagttctttaaatttgtcaagactctcttgatgtcatggcctttatttctttgtgttttagtctcattctgtcgtactgcagacacacattcttccctgaagggtcataactacccgtggcttctagttggagcaactgacctttgaagaaaggggctgcatattcccaattctagtttgaaaattttgggggaaagattatctctgtttgggtcttggatttatccctaaaactagaggtgttcccagggcactgatgtaccatggttgacccagattgggctaatagtctattactggaagcatgggagggatgaacctgggcaaataaaaacaatagctgtaatagagtctggtctgcagttcttgaaatatcagttgtcacagaaagttttccattgatttttatgcctctcctgaagatttggataagattactgtggaagatgatgttggtggtgttcaagggaaaagaaaagcagcatctaaagctgcagcacagcagaggaagattcttctggaaggcagtgatggtgatagtgctaatgacactgaaccagactttgcacctggtaggttttattctacttcgaaattaattctatgggaattcagtcaaaaaagttcttggaagctattaattgtgcaaagcactgtgttaaacctttggggtgtgcaaacttcagggacacacagaacagttcaattcagtgatagcatttggggaaaaagttttttctacgagttaacctttaagctatgccttgaaaaatgagtagcgtttcaacaaactaaaggtgtaaagtagcatttctgactaacagaaaggcattacctgtggaatagacaaatgctctatttgtctctaactgaggcttgctgggatgaacatggaagaggctcgagagggaggctggtactaatcagggagggtctcagacccactggaagaagtgtaggcttttttttcctggaggtagtagaaatccatgaattattctgaggcagaagtgatatgaaatctatattttattatgatggtttttagactcatttagaaattgggcaaatggaaagtgtagtgaccttgacagaacattataacatattaattaaaaatttaaattcataaattcataaatgtaggccaaatcaagataccatattttagattttgatatactatcaacaaacaataacagatttgctcatcgtcacttattcgactaatatttgaatgctttttatgtgcattatattctagatactagggatacaatagtgaaaaaaacaaacagctcctgtccttctggaacaacggaaatacatgaaaaaagactgttttgcatttgttttactttgggagggcctgggagacaggaaaatgcaaagacactctttgagcgccaatgtgatgcttaaaggaaatactcatttgagcattttggatttctggaattggaatgcccaactggtataatgcagatgttccaaaacccaaagaaaatctgaaccctgaaacatgtctggtcccaagcacctcagataagggatactcagcctatactatatgatctagcaatccacttctgagtatgtatccaaaacgattgaaagcaggatctcagggagacatttgcatacccgtgttcatagcagcattattcataatagccaagaagtggaagcagccccaaagtgacatttcagttttccccctgcattcgcttgtcctggatgagaatagaaaggaccatgtgtgaccttcattagggaaagaaaagagaaaattgcagagaagataagtcttttctctaacagttcccaaaatccgtaactgaagtgtttgggccttccagattttcctctatgggatgcgaatgacttggaattttgggaattccaactccccatctctaattttatttaaattgctttctcaattgactgacgaagattagttggaccccatttctgaacaagcttgttacacagaaatgttgccagggcctactgtttatcctcttgagccaagaagagaatccttcagacttctaagttactgaacacatgcagtatcagaactattggatacacagaaagttttgttgtagataatatatttggaaagtttggagaaagttcctctaccccttgccttctttgagcggagagcttcttaggattgcttgaatttgcaggctgcatttctaacagccctcatgggacctgctggcctttctgggctgattctctatagcacgggaaccgttatgtgaacatgtgagttgattatctttaacattgtgtgtgggaacaatgatagaataaggacattgcaatttgaagatcataatgacattgttttttgtttttgtttcgttttgttttttgagatggaatctcgctctgtcgcccaggcgggagtgtagtggcacgatcttggctgaccatggcctccgcctcacaggttcaagcaattcttgtgtctcagcctcccaagtagctgggactacaggcatgcgccaccatgcctaactaatttctgtatttttagtagagatggagtttcagcatgttggccagggtggtcttgaactcctgacctcatgtgatccacctgctttggcctaccaaagtgttgggattacagaggtgaaccactgtgcccagcccataaatgacattgttgatttaggtaaaggtcatcaatggaaggttgataaggatctttacaatgttgaattcaggctggcatcacctgaaccacctaagagagggacaaccacacattatatgatttctgatgtgatgtaatatgaagtacaaagaatatacttatgaagtatattcttgccgtccctcctccccccaccaccaaaaaaagcgagcctgaatccactcaagccttgagagcagaattccagctcacataaaatgcaagaatatggccgggcacagtggctcacacctgtaatcccagcactttgggaggctgaggtgggtggatcagttgaagtcaggagttcgagaccagcctggccaacatggtgaaaccccttctctactaaaacacaaaaattagctgggcgtggtgttgtgtgcctgtaatcccagctacttgggaggctgaagcaggagaattgcttgaacctgggagacagaggttgcagtgagccaggattgtgccactgcactccagcctgggcgacagagtgaggctccatctcaaaaaaaaaaaaaaaaagcaagattaagttaaatgacaccatgagctagaaaacagacaaatccagaatttaggacattctacaggacaattgactcaactgcttcagcaagtcagacacaagggaggacagggagaagatactgctctatattaaaagagattaatatagactgaatagaagatgataccaagaaactagtgttggtattgctagatgtaataatggcattgttgtatgagaaaatgcttatgttttttagagatacattctgaagtatgtaggaatgtaatgatgtgatgccttgattttattttaatatactacaaaagggaatagaagaagaagagcgagatagatgaaacaaatggagcaaaatgttgataattgttgaatctgagtggtggtttattactgtctactgtggtataggtttgaaaattttatatgattgtattttacatataatatttcttatagataggtagatattagtatgtggggacaatagtggttatctctgagtggtgagattacagagtagattttctttaataaagttttgtatggtctgtattttctacaatcagcatgtactgtttatttttcattttatttgtacattttttgatttaagcattttctgcaataagcatgtccataatattaaaaatgtaaaaaagttttatattaatataggactaaccctatttacacttagttttcagagtttatctacaaggcatggttttctgatcctaaccccctcaaaaaatagaaagatcattgcttaactatcaggttaggaaatgcttttttctagagcagctgtagcactttcaaaattagatcactggcttatattttgccacgaagtgcagaaaagcatttttgagaaataaaggtttgtcccaaatgaaatcagctctaggattatctgctaagattgttgtgtatggttatctcaattctcatttggtctgttccagaatgttgaagtttatgtgattaagggaaggctcactattaccataaatgtcactgttttgaaagactagctattgtcataccctaccattcttttcaaaagtcactgagttaaaatggtaaaatctgaagtaaagattactgatgggaaatttatagtgatggtggtaatagcaaacaattttattttgctcagtatattgcagatgttattctaaatgcattatatatatattaactcatttaatccacgcaacaaccctttgatggaggtttacagttatccccattttctaggtgaggaaactgaggctcagtgaagttagtgacctgtctgaggatgcaaacccaggcacccacaatggcaaccactgcagtgttctgctactggaaacagtgcagcacaaaggtgcataagaatctgaaagctgtggataaagttaaggcaacagaatcctcactttttagagcaaagatgaactatataatcttctgttttaggtgaagattctgaggatgattctgatttttgtgagagtgaggataatgacgaagacttctctatgagaaaaagtaaagttaaagaaattaaaaagaaagaagtgaaggtaaaatccccagtagaaaagaaagagaagaaatctaaatccaaatgtaatgctttgggtaagcttggtccaaaacacttaattttataaaggaaatgtatgtggtttgtttgccgtatttttcttatttttgcctttgttctctttaacattttcctaacgtccatttcttgttaaaatatgtaaaaggaaggtggggtggggaagggagaaaagcggacaagaatgctgactccactacgtatgctagcacttactgtatatgacctcactttggtactcatggctgccgtctgtggttagctgttgtcacctgcattctacagtgaaaaactgagtgtcagagaggttaaataatttgttggaaatcttacatctaataggtgaagggctagaatttgaacccatgtttgtccattcagagtctaagctgtatcttggaccatattttctccagacaaaacaaggaagtttgcataattctaattttttgcttttgtgctttacttagtctgatttgagagctcttttgccacatgtttagggccctttttttttttttatttccccaaaacaaattccattagaaactacttttatgataaaacgtttaaaatttatggtgactcgaacatggaatacctgtttcttgtgtaaaagaagttaggatatttttgagttcatagtatatgataggttattgcaaaatataactgtcattaactgagtttgttttatttcttgataatcatttttatgtcttggtttatttaatatatatgctattgatattaaaagttccattatttagtctttccatttattcataggagctgctgtcaccttcagtagcctgttgctgagtacttactaagaattaaatgagaattaagtactgattgagttatattcttctctctcctgtattttgaattaatgaggttttttaattagagtgttttttttttaattgatgacttcatctgggttccagaaattctgagtatcagaagtcgaaagtggttctcactgggctaaaatcaagtagtcagcaaaactgtggtcctttgtggaggctctaggagacaaaccacgttcttgtcttttctagctccttgagggtgcatttcttggcttgtggccccttccaccttcagagagcaatggcagggactttctcacatcatgttactcgactctgactttcttcctgctcacgtttacttataaggaccctgtgattacattgggcccctccagataattcagtgtaatttccccatctaagattcttaattacatctgcaaagtccctttgccatgtaaggtaacatattcacatgttctggcaatgacgatgtagacatctgaggagccagtattctgcctactacaagctataataggaaaaagttattaacaccatgaatatattttgtattttctttagatgtttgtttatgcttcttcaccaagacacactaataactaaaaataaaacttcagttcccaagttggagtttaccatttaaaatcttttctctatcccttggagcaagttgcttcacaactgagatttaatatataatattagaaatgaaatttaaccattaagtgataggactaggaattaggaaaaatggattatatttttagtcctactagtaatgtattgggtaaactttgcgaattgtgtctagcacatgttataattttcccttgatagaaaaaatgttgagagctatgctgtccaatatggtaacctctagccatgtgtggctatattacatttgaattaattaaaattaagtaaaatttaaaaatcagttcctcagttttgcaagccacatttcaagtgcacagtaactgtatatggctagcggctaccatattggacagcacaaaacacaaaacatttctataatcacagaaagttccatcagacagtgctgatctagaggatgcagatgttaacattaggaagagtatacggtgaaaatgttcatgtttatatgtgttgaaatacccctaggtatctcaaaacaagcactgtctgaaagtgaacttaatgccacctctcctccctccccaccaccaaaaaaataaataaatagaaccaaaacatacttccaggcttgtgtttattctctagataaatggcaccatcaaagtgtgcccatgacaggaacctgcaagtcatggattatttcttcatctccattgctgcctcccacctatttttgccaaaacatatctaatgtgctgttttccttctattctccaccttagcaggcccccatttcctcttacctgattaccataataaccttctaagtagcctacttctcctacactaccaccagaaagatgtttttaaaatacaaatcactcctgagaaaaatatgtgcatgactgtgactagccagactcttgtacatggtctgcaaagctcttcataagtgatctacacccagtgtctatctctcacatttcctacccttgagatttctgctccagccgtacactgaaccagtcagtactactgattctggaacttggtgcatcctccatctttgcacactgtactccctctgcctggaaagcttctctcaattcacctttactcttcaatcttgatttggttcagaccatcctcactcacctccttctaactttaaaacacatacccccagattgcagtttccttttctacttggcatacctttagagtctgccatatcccttaccacactgcattttacacatctttactttcctgttcttcccactgaagtctagtgactaaaccttaaagtccttgggagcaggagccatgtttctaaccctagagcctgacacataatctcactgacacatactcacgagacactattgtgtaatggttagttacaaggatgggattttggaggaaaatctggtttctaagcttagatgcttactagctgtcagactacaggcagattgcttaacgtctctgtttccttctctgagagtggggatagtaatatctgtattggagttgttgtaaagagttagaggtaatgtgtgtgatatgcctaccacactgcctggcatattaatgctcataaaagatggctattcttaggctctcaataaatgtttgttgattaataagtttattttttatatgattatgtaactttataatttttacacatatatgctagacttactttttcttcctgcatgacaaacatttttacgtatatttttcaaataagtgacttcggtggactctgctccagctgccgtcaaatcagaatctcagtccttgccaaaaaaggtttctctgtcttcagataccactaggaaaccattagaaatacgcagtccttcagctgaaagcaagaaacctaaatgggtcccaccaggtatggcatatttatcatcaaggacaggagcttggaaaattatcactggtaaatttttttcctagttacaaacatcatgtgtgagcatttccccatattattacatattcttcaaaaccaaagttcctggttgctgcatatattcatttatttaaccattccttattattggacatccaggtttattattttttcagtgctataaataagattgcaataagtgcaaatgtccttattttagaaatctctgggcatattactgattattttcctaggataaaatttctagtaggaaaattacagtgttaaagggtgtaaacatttgagattcctgaagtatgtatttctggcagcaaatcttttgctcaggacctgctgacctccacagtctgactgaagccttgggatctatatgtggcaattctagcatttaacaaatgccctagcaaactcaacctcttgctttcacaaatttcacttctctgttttcttttgctccacagccaagtctcatggatccttcaagaattctttgaccttcacccttcttgacattactaaaaccctaatccaggcccaaattgttgctgcctttcctaaccagtcctgtctttactttctgtcatccacctgcatgaaccgtccacttcagtgaaattgaaacactttttgtctctcaaacatgttgtatgtatgcctctctcagggcctctcttaatcctcctctgcctggtgtgtctttcttcatgtgtcccctctccttgcctgagcccttccaattctactcctgtttttcttttgaggggcctctcttgattggtccacagtgctcactcccctgctgactactattcatagatttaggcgtgagctgtgaggctgcatgattacttaacttacagagtcttcatttcatcatgtgaaatattgggaacaactgtaatctttaaagtccattctggtttacaacttctaagatttttaatgaggacttaaaaactttttggagaaggaaaggagggaagattaattacttgatgtcatatcattcaaagagtaatacttagtatatttctaaaaataattaatgcttccccaatgaaggaaatttaaatggagtgatataactatagaaatttaaaagtagcataattaaaaaaatacaaggaaacagtggaatgatggataaagagttaatgtcatcaagcacaaagtgcttatcaagtcagcatgtgacagtcaggcaagtgatgtaaacgagtgaattgggcccatgcagtagacttgcgtgggtaggaattttgttggactcaggagcgcgtacccttttgaaggaagcagctgctactcagctccatcgtattgtttccatgcaagattatgggcttggtatttctagatctgattgctgttttcaagagaagccagaaatccagattttaatatgaaatctgctaatttttgtaagttgattttttttgttgttgttgttagcaccatgtgaaccaaaacaatatatctgagagctagatttggccctcagattgccagtttgttacctatcttatacaactggagaagaccaccaagaccccaaaagtaaaattagccagaggcataaatataacagtgtccccaagaactattaatacaacaagaaaatatgaagagtttcagtctcactggtaattaaggaagtgtaaattaaaataaaatactattttatacctttcaaactagaaaacaataaagcagtatagtctgagttatagggtagcaggtataattatttattttaaatttataatactgttgtgtaggcgagcaactacagtcaccatcaactgtgaacattcatgtggataattttgaaatagatggaaataattgcgacattaggataatagtataatgaaactagtataaataaataacaatatttgccatttttaaaggtatttaataattgaaaaatagactcttcaaggactacttgtaaaaattgcaggaccttaaaaatgcatttgctttttctattactttagaaattataattatatgcatttttgtatgcctttacaactagcattatttgttcccagccttcctttttcagctttcatggtgaggttttagtgtcattaccttggcttctgggatgtttggaaataggcaatactgtattaatttctgctctttagaacattctgttcttttgatctagtttattgcttgatagacactggaaagcagaataatgcttaactaccttttttttgctgcttattttataaattaatctttgttaagagatttctgacatcatcagcatcacatcatatgtttcctttcagcggcatctggaggtagcagaagtagcagcagcccactggtggtagtgtctgtgaagtctcccaatcagagtctccgccttggcttgtccagattagcacgagttaaacctttgcatccaaatgccactagcacctgagtgtggtacaggaggaatgtttggttgggagaatcacagctttacaagggtgtttatatttgatttgtgtttatatttgaggcaggtattgtaatataaaggaatccattaccatgtcctataaatgacctctagccattttatgattatgttctctgtaaaactcttcaagacttcaatgagaagtttgtttataagaattatcttctcatacctttccttgtgaagagcgtattctgtttttctatcagttcgacatgaagtccacatcacatgctgttcttttctagttacatgatgtgcctttctagctttgtctagtttatagcaccttaactttaactgttcagttttatctggcagaggaaaacattcttatttctttcagaagacatttctgaaatcttataagctacttaagctacgttgtcagttttatcgcaaagatgttttgtattttagccaaatctttttatagtacaaacttagaattattttacacactaaaatggttgcagttttatggcatatgtctccgatttagatggttattctctagaaaatagtatttaaagacattttatgaaatcttcattgtcaaaacctttaataaaagtggaaatattttgaaatgccctttttcttgataccactcatccacgtgttcctgattgtccacatttcatgataaaatgagagctccgcagagaatgttagcctttctgttgtaaatgtaatcttcaagtagtcactttttgttaagttctttagaaagtagttgtcaagtacttagtcatccctattatgatatgagatagtacagcttttcaggaagcttagatctgaatttactttgaaaaacaattgtaatgaatattttatatttacattgagaatttcaactagcttctgatcaatttttaataaaaaattttcaaatcatgttagctgttaaaaaatgtataataactcagtttttcttggtttatggaaatatctatattaatgtgaaaataattaatttagaattgtgattaaagtgagcatttgtctat

SEQ ID NO: 100 - DNA, 16610 bp, Homo sapiens
accggcgtattcccgccctgcttttcgcccgccgttccgtggcgggaactgaggcgactgtggggacatcagtgatcgtaagtctcctgggcccgttattctcagattaggtgacggagctaagacttcgagaccatctcgtcctttttgtatcgcggaaacctgaggaacgagccggcggcggtgacctgcacgagaagccaggctaactggtaacctgctggaggaactgcaagcccgcttcgccttccccactcctgcccttgatgccccttgtgaggtcttccacctccttcggggccccagcctagtggccctttcatgccctggccgcgccctttggtgaaatggtggttccggacagcatcttgcaggccccggctttgggctgtattaatgtttaacagcccgaggcagggatggactaatccagtaacgttataaaaaccttggctgctaacagatattaaaaatttattttattgagcatatccccatatgccaagcaaggaactatgtatttgcatacattcttttatttaactcagttgtcctgtggaataggccttagctcctttaacagaaaaggaaaccgggtatcatagatggtaattcattcaccaaatattacggagcatctaccatgtaccaggcactgttctaggcaccagggcatgtagcagtgaaaaaaatagaattaaccggggacttttcaggcgagctaatgatgctttttatccctgaaaacagcctggaagaatgtttacctgcatgttagaaatagttaccttctgggtgggattttgtattacttttttaaatctctcatgcttttatgcattgttttgatttcttcaagtgagtgtgttatgagaaaaacagctgtttctattttaacaacagagtcccccaccttcccttccccacagaaagtctctgaaggtaggtaagcattgactctgccatgaaaataggtccctggccaggcgagatggctcacacctgtaatcccagcactttgggaggccggggcaggaggattacttgagcccaggagttccagaccagcctaggcaacatggtgaaaccctgtctctaccaaaaatttaaaaaattagccgggggtggtggcacgcacctgtagtcctagctactggggaggctgaagtgggaagatgacaggagcctgggatgtcaaggctgcagtgaaccatgattccgccactgcactccatcctaggcaaaagagtgagaccctgtctcaaaaacaacaacaacaaaaaaaggtctttgagttctgacccaaggaaaggagtgaaggttctcatttgtggtgcaagcagagcacctttaattgccgaagagtccatttcagggtctgagctagagctaggcccatgactgtgaaagaaaccatggaggcccatgtggtttggtcattagcaacatcatatttatcaatgcatttggaactcattaaacatttttgtgacatatgatctttgttctataactcctgcactagaaatagattctaagttcgttagggactttgaccacttttctgttcttgtagccctcagtacagtgcattcagagtgtcctaggtcatggggtgatgtcctttattatgtaacatctttgcacaaggctaagtttattttcgggctgtactttctcataatggttccccaccaccacccccgctttcctatggtgctgattcgcaataaaagtttcaataaaagctttttttttctgtcttgcacctgaccagggtgaagtaccatgcaagcatttcttaaaggtacatccatcagtactaaacccccgctgaccaaggatcgaggagtagctgccagtgcgggaagtagcggagagaacaagaaagccaaacccgttccctgggtggaaaaatagtaagaacacttgtgtctttgttaaaataattcataaattatctctctaaccagtactgatcacttttttttttttttaacttatggaggaatgctttgttctgtttagaagttgtctttgaaaaaaaatcacccacttatataagtcatagaaccctggaactaaagttacctgagaataatctagtttaactcccttattttgtagataaactgagatctctacaagcagaggcttccattttaggggctgggatacagaagtgaagaaaacaaaagtttctgtaaactggctataaatactaggtcaggagttctacttaaatccaaatatgtaatctgttcctccttcttctcattacaataggtggaaagtattattattattattactatttttgagacggagtctcactctgttgcccaggctggcgtgcagtggcatggtctcgactcactgcaacctccacctcctgggttcaggtgattatcctgcctcagcctcccaaatagtagggattacaggtgcccaccaccacacctggctaattttttgtatttttagtagagacggggtttcaccatgttggtcaggtcgatcgcaaactcctgacctcaagtgatccacctgccttggcttcccaaagtgctgggattacatgcatgagccaccgcgcccagccctggaaattcagttttggttagctcatacatttttgtccaaacaacacttgaattagcatttaaattgtcagtcaccacctggcatggtggctcatgcctataatcctgtatgtaatcccagcaatttgggaggccaaggtgggaggatcacttgaggccaggagttccagaccagcctggccaacatgtcgaaaccccctctttactgggaaaaaaaaaaaaaaaaaattagccaggcatgttggcgggcacctgtaatcccagctacttgggaggctgaggcacgagaatcacttgaacctgggaggcagaaattgcagtgagctgagatcacaccactgcattccagcctgggtgacagaacgagactctgtctcaaataaataaataaaattgtcagtcatctaagtgatattaccacaagtaattgtaactattggttgaatgtagcctcggtaattaccaatgtttacagattacttataggccgagtaaggccctcatatgttttttgtgtttttgttttttgcttgcctttttgtttgtttgtttttttgggacagattctcactttgtcacccaggctggagtgcagtggcgcaatgtcagctcactgcaacctctgcctcccaggttcaagtgattctcctgcctcagcctcccgagtagctgggattacagacatgccccaccacactcagctaatttttgtatttttaatagagacaaggtttcatcgtgttgaccaggctggtcttcaactcctgatctcaggtgatctgcctgccttggcctcccaaagtgctgggattacaggcgtgagtcactgcgcccagccccttatatgttttgtttggcaccaataaacctcatgaaaatctagatttttttaattatgtggaggagggtctggattttcagcttctcaggagatcaggcaacactgggggcaggttctcacatgacaggagttatatggacttgtgtactgcttctccttttggaaaggtcgtgtgttcctcaatttgccatggtccctactatatcttgcatcacactctgccttcctcactcttgttatctgcttaatctctgcaggtatttgaatatgagtccctgctttataacatatactggattcccaagagaagacattaaaaaaaaaaatcataattcctacctagtgttaacctgatttatcgaaaagtatggatcaaagaacttttgattagttaactaagcacaaagcctaagcttagagttggaagtgtaactttgttctagcttctcttaaaaatcactgttgtaagatgaaaattatatatgatacttcatattggttcagcttgttgtttttgttagccctcaatgaattgaataggtcttcatttttttatgcagttagatgatggaaaaaattggcattaaccagttaacacatactaagtatatatgtaactacattaaccaaaatagttacctatactaaggttactaaatggttttcccttttcatcttaagattcatgatcttattttgtcaaagtggaacaatgctttttttttttcttttgagacagagtcttgctctgtcgcccaggctgaagtgcagtggtgcgatcttggctcactgcaacttctgcctcctgggttcaaatgggactacaggcatgtgccaccacgcccacctaattttttttgtatttttaatacagacggggtttcaccatgttgaccaggctggtctcaaactcctgatctcaggtgatctgcctcccaaagtgctgggattacaggcgtgagccaccgcatccggccaataataatgctttctaagcaggtgttcactttaattttttttttttttttttttttgagataaagtttcgctcttgtgacccaggttggagtgcaatgatacgatctcggctcaccacaacctctgcctccagggttcaagcgcttctccttcctcagcctcccgagtagctggcattacaggcatgcaccaccatgcccggctaattttatatttttagtagagacagtgtttctccgtgttggtcaggctggtcttgaactcctgacctcaggtgatccacctgcttcagcctccctaagtgttgggattagtgtgagccatcgcacccagccccactttaatttctttttttttttttttttttttgagacagagtctccctctgtcacccaggctggagtgcagtggtgcgatctcagctcactgcaagctctgcctcccaggttcgtgccgttctcctgcctcagcctcccaagtagctgggactacaggcgctcaccaccacgcctggctaattttttgtgtttttagtagagacggggtttcactgtgttagccaggatggtcttaatcccccactttaatttctaattagtgtttgtagcatataaaataaaatcctttttctttaatttttgtgggtataacagattcgagcaatgcagaaaggaagtaaaacattatttcactctttcagaatgtgtttggttacggtaaaaacaagtggggtttccacctatttccgattatgaaaaagtttctcatttcattgctgatgtttaagaatggtcattggtattttagtagaaggaacacttgagagttttctgtggctactataatatactaaataacctctttcctccttctcaccccgcaagtcgcccaaaatgtgtggatgaagttgctttccaggaagaagtggttgcagtgctgaaaaaatctttagaaggagcagatgtgagttgcaaatggtgtttaatgtcattgggatatttaagacttaatttattcaccctctttcttcctttataacttctagccctcgttaaatatcttgctctgtgtacagtaggtccttgataactatttgtacaatgataattagttcaaatatttattgagcatctcctatttaatcttacatagcagtgttacctagtattcaagtaaaagtcatagtaattaagacaaactatgaaacatagacatagaacaagacataaaacatagaacaagacaaactatgccccttttttcatgggtttttattggtaaggaaagatagaataaacaagtaaaccaataaataattataggtagtaatatgtgctataaagaagagccagagattcctctaaagtataattgcttactaactttaggatttggattgacctataatacaaaaaaaaaatcgagctttgaattctgcttatagctctctcttctgctgtgatctgggggataaagtatccatggataacttgcattgtaaattattctgagataagataaacccatgtgaaaaattagcaacttaaagttgtgttatgatgaatgcccaaagtgctttaacagctcagtaaagtgctgaagtgggatgtggtttttgctttagtttcaagatttgcttccttcctctcaatctggctgcttttaattagaagttcttttgggttttgctgccatcattcccttgctgaaattatattactacagtacacattttgaaagaagttaaatttataaaactatttagaatctttttctttaccagtatgtgttttgatttgactcgcatactcttatacctttttggccggccacagtggctcacgcctgtaatcctagcgtttcgggaggctgagatgggaagatcacttgaggtcaggagttcaagaccagcctggccaacatggtgaaaccccatctctaccaaaaattagaaaaagtagccaggcgtggtggcacacacctgtagtcccagctactcaggaggctaaagcgggagaatcatttgaacctgggaggcggaggggttgcagtgagccaagattgtgccactgtactccagcctgggtgacagagtgagactctggtctcaaaaataaataaataaataagtaataaaaaataaataacacaaatactcttataccttttaattttataatagtatagcattttattttttggtatattctgcttgcatatcttggtaacagtatataccattttaattgcagttgcatagtaattacacagattgcaggacaatatctaatttaattactagtatcttcagcaaatgtagtgagattaagatccagttcttttgtttttttgtttttttttgtaattgagacagagtcttgctctgtcacgcaggctggagtgcagtggcgtgataccagctcactgcaacctccgcctcccaggctcaagtgatcctcccacctcagcctcccaagtagctgggactacaggcatgcaccaccacacacagctcatttttgtatttttagtagagatggtgtttagccatgtcaagtgacctgcccgctttggccacctaaaatgctgggattacaggcatgagccatcatgcccagcctaagatctagttcttgactttatgccacgtaatttatgaggctgaagtaagaacttcagtttaatattttgtgcaccttttcagactaagttttgtaaagaggtgaaatagtttttttaattcaaaagagtaaaggaaaacaattcattcaatttattttgaaaggttttaaagaattataagaagataattttttcagaaattgattttaagaactggtattccacatacagttcttgaatgtactacatatattagactagtgtataattaaggtttaataattttaccctgtttcaaagaatttaaattattgtatctgatagttaacctggatgaatcgttacattgttaagggatgcacagatcaaaataatagttgtagaccttaattactaagaagcctgggaggtttttaagttatgaatctcatagtttgttctgtaagctatatgttatgaatgtaacagtaatagtcttctaattaacatatttgtctatgtattggtttattcattcatttggccaacattgactactgtagtagatgctagaatacagatgtgaatagaacaaataaggttcttggtcttttaatgaagtagacaggcattttacaattaagccccacagtgaaataacaataaaccaatgcaaaatgcaacaaacactaatgagagaataggagaggagacctactttagactgaatggtttctgatttgtaatgcattaggagttggccaggcagaaagaagaggatcagactccaggtcatgggagcaacatatgttcgggccagaaagtgccaagctgttagaagccattgtaagctagagcctggaaggtgaaggaggtggtaggcagatcatggaagtcctttaggccatggtaaaaagctgagggttttttggtttgtttttgtttttctaagtggaatagttttaagtagcaagcagagtggtatctgatttaggtgaagaatgaatggacaggaagagggagggttaggcaagagtggaaacaaactctaatgcctagtttcctgtgtacactgatttccttatgtgacaggacatactgaagattgcacagtatcataacagagctcattagaatttagttgacttattaattttcaccacggatcagtcgactgcttgataggagccaaactagctagatacaaggtataaaagaaggtagctagtgatttaattttatcctttcctcttctaatgaattctccctgatacatgcaagcatccttacagagtgcataatcatgatgtggagcagtgcctagtacttaatatatatctagttttggattttttgttaatatttctgttcttggtacttctgctcatccaaagccctaattatgtcttttttagtcctttttcctcagttttggccaaatcccattactcttttggtctgcttcccctttgaagcagctgacattttgtgtaatataaaatcttacctaatcttgagcatagaggtgggataggaaactgagattccctttagaaataaaaggtttctcattccagctttgaaaatttcacctaagtggattagctatagagcaagcataaatattggttcagcttaagagattaaaaagacacttggggaaaaaagtggtagtatatgaaaaagcaggatttaaatctgtcagtactatgatatcagttatattaagaaaactttatacttagaaattacgtgccctattagagaagtcattgcactattccacagacatttttttcgatcttccttttcatctatttgtgccagaataccatttattaaaaataaaatttaatttctacagcttcctaatctcttgttttacggaccacctggaactggaaaaacatccactattttggcagcagctagagaactctttgggtacgttgaaatcagtctgtttttctttttttaaagatttgacaccaaaattctctgatattgctttttttcctctaaaaatttgcgtttcgttttctgtaggatagttttctatttctgatttttaaaaatcccatgagccattttgttcctccctcactcccctgaagaaatcagcttgcctgcgtcttttgtgaccttcattgtgaatcttgttcaagtgtggggagcctatgattttttccatcactttctttaaattttccattataactttggagtccagagggcccaacttaatgtccagttgtgctgatagttttatcaccctcttaatgattgtgttcacatctgtgtggctacatgatagaatctgctgtttctgatggcactatttgcaccatccattcttgagtcctgctctggacttcctaggctctgactctggagtggccagtccagctccttgcctcaggtctcctgagcacaagtgatggttgatgtagtgtgattccaggtacaccagaaaatcttcctgtgagtcaccttcttatgttcctcttcctagattgaccatcttggcttaaccagccattctagaggagccctttacctagagttaaaagatgtgtagtgggctgggtctgatatacatgaaacatgcaccaacataacaaaggctgttttgagtttatccagaattaatatcagacatacaactgatagaaatatctgaaatcctacatatgaaaataggctgggtgtggtggctcacatctgtaatcccagcactttgggaggccgaggcaggtggatcacctggggtgaggagttcgaaaccagcctggccaacatggtgaaaccccatctctactaaaaatacaaaaatttgccaggcatggtggcatgcacctgtagtcccagctactcggcaggctgaggcaggagaatcacttgaacctgggaggcagaggttgcagtgagccgagatcacgccactgcactccagcctgggtgacagagcgagactccgtctcaaaaaaaaaaagacgccactgaaatcaccaaatgtgtaaggattattagttatgtcaaaatgtaaaagacaaagggagaagctgctatgtgcctaatattttatttgacagcaattttttattctcagtaaaattatagaagaacttttttgattattccacaactcaatcagatagaaccaatctgaatcagccttaacagttgtttattattacttagagtaggtcagtccagattatacaactttttctatatcctttatgaaataatgtttgtctttaaagaacttactttaacagtgaatttcatatttaatattgtggctttaaaatagaaaatagatgcatgtaaatgtttatgtccataaacatgcttaggataccatgctgattaggaaaaatagagatgaaactaaatcacaactcttgttttttatttaaatgtgtgtgtgtgtgtgtgtgtgtgtgtgtaaaagactagagggaagtttcaaaaacagtgctttgacagtgtgcccacttttttcttttgatttctcaaatttctctacagtaagcatatattacttttagtaatttttattaaaactcactttaaaaacctgctcatgttttaatccattaattttccttaatccagtaggtttccttatagcaaactaccctgtggaatttatttatttatttgtttatttatttatttttgagacagtgtctcgctctattgcccaggctggagtgcagtggtgcgatctcggctcactgcaacctccacatcccgggttcaagcaatcctcctgcctcagcctcctgagtagctggcactacaggtgcctgtaaccacgcccagctaatttttgtatttttagtagagacagggtttcaccacgttggtcaggctggtctcgaactcctgacctcgtgatccacccgcctcggcctcccaaagtgctgggattacaggcatgagccaccacatccggccggaaataatttaaaatgtgctatattataacattatttaaaattacagtatttaaaactatctagatgtctaacaatagaagaatgtgaagtaaatgatggtacagtcataggatggaatatcatatgactattaaaatgttatttacagtggttttgataatatgccaagatacttattataaatgcaaagtggaaaatcgatttaaaattttatatgtggggccaggtgtggtgcctcacacctgtaatcccaacattttgggaggccaaggtggaaggatcacctgagaccagcctggccacataatgagtccctgcctctacaaaaagtaaacaaaattagccaggtgtgatggcatgtgcctatagtcccagctagttgggaagctaaggtgggaggatcatttgagcccaggagttcaaggctgcagtgagccatcatcatgccactgttctccagcctgagtgacagagcaagaccttgtctccaaaaaaataaaaagaaaagaaattgtatatgttatgtaatgtctacatttttttaaatgcatggaaaaaagccaaaatgttaactgcagcactctgctgaagcgagaatgcaaaagtgattgtgtgccttctatccatgttgtttactaggtggattttaaacgtctgcaaagtgtgcaaatgttaaaatgtgatttaagcctacttgtgctctatgtttcatatttgtttcattttgagataggcctgaacttttccgattaagagttcttgagttaaatgcatctgatgaacgtggaatacaagtagttcgagagaaagtgaaaaattttgctcaattaactgtgtcaggaagtcgctcagagtaagtaaatttgccctccctcctccatagcatgtattattttaaatatgtatttctgccatcgctcctcagccttttggctaagatcaagtgtatttctgccaaattgtcaacttttcatgttagaagactatcctgcctgaggtaaacagggatttaatcaactacttatgctccttaggtggcaaaggtccaggattacattggtggtacctagacatatgtgtaaattttacatgagcacatttcaaaatttgtgaaagtgaatgactaatttttgatatgcaccttaaattgatggtgcagtcagtcacaaccgctatagcacctaatgtatttttatgtgaaatgaagactgggaggtggactaaaagactctgagatcccttctaccattaatacttgaaatctgttttcttggtataattttcatacaattatgttaatgccacttttggtgggagaaaaactttaatggcagattaccaaaaatcaatgtacagaaggtaataacccgcaacgtgggagaaaatatttacaaatcatatacctaaaaaggtacttatatctagaacatatgaagaactttaaaaactcagtaataaaaacaaataacccaattaaaaaatgggcaaaggccgggcgcagtggttcacacctgtaatcccagcactttgggaggccgaggcaggtggatcacaaggtcaggagatcgagaccatcctggcgaacatggtgaaaccccatctctactaaaaatacaaaaaattagctgggtgtggtggcgggcgcctgtagtcccagctactcgggaggctgaggcaggagtatggcgtgaacccaggaggcagagcttgcagtgagccaagatcgcaccactgcactccagcctgggcgacagagcaagactctatctcaaaaaaaaaaaaaaggcaaaggatctgcatagacatttcgtgcatgtgtaataagcacattaaaagatgctcatcaacatcattatccatttgggaaatgaaaatcaaagccacattgaaataccacgtaactcccactaggatggctatgataaaaaatacagaaaataactagcattgacaaggatgtggagaaatggtaaaccgcatacattgctggttggaatgtaaaatggtacagcctcttggaagacatgtctgctcaaaaacatgtacacaaatgttcacagcagcattattcttaatagccaaaacatggaaacagcccaaatgtccaaccgattaatggatgaataaatgtggtgtatctatttgccatagtatttgacaatacaaaggaatgacgcaaacacatgctacaatatggatgaacctttaaaatatgttaagtggaagaagtcagccacaaaagactgcatattatatgttccattcatatcatgtccagaataggcaaatctatagagatgaaagtagactaatgattgcctagagctgggaatgactgggggaagaagagtgactcctaataggtacaaagtttcttttaggagtgataaaaatgttctaaaattagattgtggtaatggttgcacaactttgtgaacatacagaaaaacactgaattgtacattttaaatgggtgaattgtatggtacgtgtatctttcaacaaagctgttaaaaccaatatacatattaatgttcaactcttatgtgtttctctgaatcagtgggaagccgtgtccgccttttaagattgtgattctggatgaagcagattctatgacctcagctgctcaggcagctttaagacgtaccatggagaaggagtcgaaaaccacccgattctgtcttatctgtaactatgtcagtcggtatgtatattgccctgaagacagatgctaggcagccttattttcataacccaattagggaaaggaaatttaggattttcaaggctacattaatttttcctccatcaaatcttgatttgttcttgataaaaatgagttcttttggggaaattctttctttagacaccaacttggtttttctcatcttccacagaataattgaacccctgacctctagatgttcaaaattccgcttcaagcctctgtcagataaaattcaacagcagcgattactagacattgccaagaaggaaaatgtcaaaattagtgatgaggtaattactaattattacaattattagagttactaattcctttgatgaatgcatataaagaggccctgaaagatttaaatgtgtgttgcctcaatcctgatgccagttcttcagacaaacttaagctaaaggggcaacaattgaaatgtgtaggaattacaaggtttagcttttctattactttttgagttaattatcttttaatatatcagagacccgaaactgaggtggatttcatacatataatgcaaattctgcaacataaatctctgcatgatgacaagattttagtcttctagctaatacttcagtacttccctaaaattgatagaaacataaggcccttattcattataacagaatttaaccataatttgaatttgctttacgtgagcaagaaaatgggataaatatggaacattttttcatctctgcaaatttatttcagaagcaagagatctctatccttccattgtacccggcccctagactgatcatattttctcccaaaacagaaatgttttttctcattaactctagactaaaacagggtttttcacttttattaaacattttaaaattaaagttataaatccttaattggccatcataggttaaaaacaactcttttctcttcagggaatagcttatcttgttaaagtgtcagaaggagacttaagaaaagccattacatttcttcaaagcgctactcgattaacaggtggaaaggagatcacagagaaagtgattacagacattgccggggtaagagtactggatattctgaatttctttttagttggcttttttgtggcttttaggaaattttcatccaacaaatactgggtgtttagcaagtgccaagtactgcactaggaagtataagggaataacctgggagtatcagagtgtttgaggtgaggagatagcactgacttttcagtttgtcaggcatgtaacagacatttcaggaaagaaaaggacactttcagttgttagtttttttgtttttttttttttgagacagagtcttgctgtgtcgcccaggctggagtgcagtgacgcaataccgactcactgcaacctccacctcccgcctcaccctcccaattagctgggattacaggcacctgccaccatgcccagctaatttgtatatttttagtagagacggggtttcacgatgttggttgaccaggctggtatggaactcctgacctcaggtgatccgccccccgcttagccttccaaagtgctgggattataggtgggagccaccgcacccagccttcagtttttagattttataagagatgcctttggcagttaaatcaattttagcagatgttcttatacatgaaaactattttgccagttgtatataaacaaaaggcatatccaacttacagtaatcatttattaaagagaatggagtaccccacttgtctttggatactcccatgtaaaaactcacttcagaatcactactacttaacaacttttgtttctgtgacatttttcacctgcacggtaggccttccatatgacaagactggtaccactaatcctctttgtttctatgacgtttttcaccttcacggtaggccttccatatgacaagactggtaccactaatcctctttaattttctggatattgtggactttttaaaccaatctcattagtggcatctttacatggagacattgagagaaagggcacttcccctttaaagaaatcagtctttttgattgatcttggccactgttctgaggaatcgttatagccgctaggggaaaacttaatcttcatccactgaccagaacaagctataatccatgtgtgcccaaacttggaagttcacaaagccattaaagggctttaaaagcacagttgttagcaccttggttgcttagtggtgactggagttactctggccctttccgttctcccaaagccttcccaggaaagtatggaacttaggtgtggaacagaaatgactgggggcacgggggccagttggcagagtgtatgtctagtctcacctagaaacatctttaataccgaacattcaattacctaggtaataccagctgagaaaattgatggagtatttgctgcctgtcagagtggctcttttgacaaactagaagctgtggtcaaggtaaagtcagcttactaactttggggaaaggaatattaagtcatcataccaaaagttttttttattataggatttaatagatgagggtcatgcagcaactcagctcgtcaatcaactccatgatgtggttgtagaaaataacttatctgataaacagaagtctattatcacagaaaaacttgccgtaagtaggtactttgcacatgtcaatggaacatttaactacctgaaggatgctaatttcttaaatttttctcgtaggaagttgacaaatgcctagcagatggtgctgatgaacatttgcaactcatcagcctttgtgcaactgtgatgcagcagttatctcagaattgttaacgtgaatatatctggatggggggttttgtaaataatgaagttgtaataaaaataaaatgaccaaaagcacctttaaa

SEQ ID NO: 101 - DNA, 15842 bp, Homo sapiens
ccacttggcctgcctccgtcccgccgcgccacttggcctgcctccgtcccgccgcgccacttcgcctgcctccgtcccccgcccgccgcgccatgcctgtggccggctcggagctgccgcgccggcccttgccccccgccgcacaggagcgggacgccgagccgcgtccgccgcacggggagctgcagtacctggggcagatccaacacatcctccgctgcggcgtcaggaaggacgaccgcacgggcaccggcaccctgtcggtattcggcatgcaggcgcgctacagcctgagaggtgacgccgcgggcccctgcgggacgggtggcgggaaggagggaggcgcggctggggagagcgctcgggagctgccgggcgctgcggaccccgtttagtcctaacctcaatcctgcgagggaggggacgcatcgtcctcctcgccttacagacgccgaaacggagggtcccattagggacgtgactggcgcgggcaacacacacagcagcgacagccgggaggtaagccgcgtcccagcggctccgcggccgggctcgcagtcgccccagtgatgccgtggcccccgaggcgggcgtcatcgggcagcgtttgcccagtgctggagggttagggagagctgcctgggcttgaccgcgcgccggtctcaaagtcctggctttggcccctcctccgttttcccctgtggaccattccgcttcgcagcgttttcaaaaactggagcgaaagtgatgtgggcggggcaaaggcggcgggaagaggagagcactgaagctggcgcgggaacttggtttcctggtggcctcccatccaatccccacgaaccagctttcctcttaaaccttgaaaagagaaattcgggagttcgagtataagttcttagtcgtcctttcctctttcctttccgacaggagcaccccaggcaaaaaatgtctcgcgggtcattggcgccaggctttcaggggacagtggggcggggcggggtgggcacaggacgttaggcagccgttggccctccctaaggccacaccgtcctgccgtcctggatcctgcgccagctgcgcgggggaggggactcgaaggtgtgtgagccaggggctgaccttgaccgctcagataaatggagcgcagccttgacacaggggtggaggtggttttgaatggggaaacccattcgtggtgaagcagattcactgtagctagcggaaaagccctccggcccacggacccatctagagacgaatacatagcagctgctgtggctgattggcgtgggacagcgtggggagttttgtctgaggagagggatccacttttctgcagctccaagcccaggggcctttgatgagccatagacctcatttttaacccacctttctgcttagacattgagcaagttacttctcatatagcttccctatatgttaaaaatggagaaaataatgcttagtaggcaattctgataaaagcaggtgcttgcaaaaatctctctgttgtctgaatataaactgtaccacaagcgagtgcggatgaacgaggactgcatttaaagataagtttttacactttcatttctctgtggctcgacacttctgatgcctccctttttgttcctgggacacatgcttggtgttgtcttcacacctttgtgacaggattagcactagtgggcagtggatgatagctcctcccttttgccacatgttcatccctgccctcgccaccatctcactgtgtggaattcctgtgtccactggtcaccggggcacagaagtgctgtctcagcctgaatcgggccactgatgggacttgcagcctgggagctccaccgtgatctctggcccactttgcgggagtctaggctttctggatgctccagggcctcacgtcccagggcagttttcttccctgaagaaagttggatggcatgatctgtcttcccatcttgaaaccgtatggcaaattgtttttcagatgaattccctctgctgacaaccaaacgtgtgttctggaagggtgttttggaggagttgctgtggtttatcaaggtaaagaagtcgctgctattagaagtcagtagtctgttctcaacacagcagccagtgagatcctttcaaaactcaaagcagccaggtgtggtggctcacgcctgtaatcccaccactttgggaggctgagtcagatcacctgaggttaggaatttgagaccagcctggccaacatggcgacaccccagtctctactaataacacaaaaaattagccaggtgtgctggtgcatgtctgtaatcctagctactcaggaggctgaggcatgagaattgctcacgaggcggaggttgtagtgagctgagatcgtggcactgtactccagcctgggcgacagagggagaacccatgtcaaaaacaaaaaaagacaccaccaaaggtcaaagcatatcattcctcaccctcaagcccttagtggctccatttcactcagtaagagccacggtccttatggtgtccgtttttcagctctgaccttagctgctgctctctgcaccagccctgctgttcttgtgagtttttgagcacaccgggacatccccactccctggaaccttcttcccccacacttggcttcttcctttgagtctctactccactcgggcaagccttcctagacctcctgatttaaaactgtgactctcccccaacctccttggtgtttctccatagacgaacatcaccatctgatgtatgtcagcctttcccttcccctgttagaagggggacagcaggtagtaaaagtgaaatgtgctgtaagctttatgagggcagaggatttgtttctcgtgttcactgttgtatcgccagggcctcaaacacagcctgccacatagtaggagtcaacatatattgatcactaaatgtagataccacctgtgttcccatgttcatataaattctagaagagtctcttcagtaacaaggtgaaccccttccagagggctgagtaggtacctcaggccggggccagagtgctgtgaagacaggcagcagcccagaccaagcttctctgtgttccgtgtcctggtctagaaccagcgatgttctttctgaccagtgctttttggaaggtggctgaggtctgggctcaggtctgggccatactagaagctgggatcccttctatagagcacttggtatggcttgtatggtcttggggcaagccagacccaagccctcttatcccattttagaaagggcttcaatttggatccagccccaggtctgccttagctctgtattcttggggtattttgttctgtattggcctatcttgactaacaatgaaccttggatttgaaacatatcatcagaaacctcagaagacaacattcttaaactggctagagcctggtctgaatggatgaaaaggagagacttttgaagcaatatgtaaaagattgagaaatgatttgttggaaatttctcaattggagaaatttctttgatttgttggaaatttctttgattctttctcaatcaaagaaaatcgggacaaactcaacaatagaaagggaggaagcaagatactcagaaataaaatgcattcccctgtttcaacttaatgcttcaattcaggattctaaggaatccttgccaggaatgtcagactcaccttgatagttggagttactccattggtgactcgatcaaatacaggagttgaggcacctgcactgtaaaatactgattagtctgatcattaggaatatcctgtatgccaggtagaagatacattgaacagattgcatgtaggcattaaattcattttggggtattacatatagacaacacatttcattaagaaacataaaactgtcagatcggtggaatacttaaaagcacttggaggtgtttagcctaaaaagcttagttgaggggaatggaagaaaagatctgggagggtggttccaaagaagggatcagactgtcctaaagccctcaggaatctgggctgggaccagcctacttaaagataggatgggcagctgggtgtggtggctcacgcctgtaatcccagcacttcgggaggccgaagtgggcggatcacctgaggtcaggagttcgaggccagcctgaccaacatggagaaacactgtctctactaaaaatacaaaattagctgggtgtagtggcgcatgcctgtaatcccagctactcgggaggctgaggcaggggaatcgcttgaacctgggaggtggagggtgccgtgagccacgatcgcgccattgcactccagcctgggcaacaagagcgaaactctcaaaaaacaaaaaaaaggatgggttccatatgggtggtgtcaagtgcccacctcctagcaagtcagcaggggccagaggcccttgtaagtggtgtctcggggggatcaactgagatggcttaggatttacctggatgcctgctctgctctccccatctcttccagggatccacaaatgctaaagagctgtcttccaagggagtgaaaatctgggatgccaatggatcccgagactttttggacagcctgggattctccaccagagaagaaggggacttgggcccagtttatggcttccagtggaggcattttggggcagaatacagagatatggaatcaggtgaggagatagaacaatgccttccatttcccgggtgcccttcctagcatgtgtttgctccgttgttttagataaggtctgggggatgagtcaatgtcacaggagctgatgtatagctttgaccttgtgaggggtggtgccaggttaagccacaattaagcctcatgaaggccgtttcacactcttttttttttttttttttaattattatactttaagttttagggtacatgtgcacaatgtgcaggttagttacatatgtatacatgtgccatgctggtgcgctgcacccactaactcatgatctagcatcaggtatatctcccaatgctatccctcccccctcctcccaccccacaacagtccccagagtgtgatgttccccttcctgtgtccatatgttctcgttgttcaattcccacctatgagtgagaatatgcagtgtttggttttttgttcttgcgatagtttactgagaatgatgatttccaatttcatccacgtccctacaaaggacatgaactcatcattttttatggctgcatagtattccatggtgtatatgtgccacattttcttaatccagtctatcattgttggacatttgggttggttccaagtctttgctattgtgaatagtgccacaataaacatacgtgtgcatgtgtctttatagcagcatgatttaatagtcctttgggtatatacccagtaatgggagggctgggtcaaatggtatttctagttctagatccctgaggaatcgccacactgacttccacaatggttgaactagtttacagtcccaccaacagtataaaagtgttcctatttctccacatcctctccagcacctgttgtttcctgactttttaatgattgccattctaactggtgtgagatggtgtctcattgtggttttgatttgcatttctctgatggccagtgatggtgagcattttttcatgtgttttttggctgcataaatgtcttcttttgagaagtgtctgttcatgtccttcgcccactttttgatggggttgtttgtttttttcttataaatttgtttgagttcattgtagattctggatattagctctttgtcagatgagtaggttgcaaaaattttctcccattttgtgggttgcctgttcactctgatggtagtttcttttgctgtgcagaagctctttagtttaattagatcccatttgtcaattttgtcttttgttgccattgcttttggtgttttagacatgaagtccttgcccatgcctatgtcctgaatggtaatgcctaggttttcttctagggtttttatggttttaggtctaacgtttaagtctttaatccatcttgaattgatttttgtataaggtgtaaggaagggatccagtttcagctttttacatatggctagccagttttcccagcaccatttattaaatagggaatcctttccccattgcttgtttttctcaggtttgtcaaagatcagatagttgtagatatgcggtgttatttctgagggctctgttctgttccattgatctatatgtctgttttggtaccagtaccatactgttttggttactgtagccttgtagtatagtttgaagtcaggtagtgtgatgtctccagctttgttcttttggcttaggattgacttggcgatgtgggctcttttttggttccatatgaactttaaagtagttttttccaattctgtgaagaaagtcattggtagcttgatggggatggcattgaatctataaattaccttgggcagtatggccattttcacgatattgattcttcctacccatgagcatggaatggtcttccatttctttgtatcctcttttatttcattgagcagtggtttgtagttctccttgaagaggtccttcacatcccttttaaggtggattcctaggtattttattctctttgaagcaattgtgagtggaagttcactcatgatttggctctctgtttgtctgttattggtgtataagaatgcttgtgatttttgcagattgattttatatcctgagactttgctgaagttgcttatcagcttaaggagattttgggctgagacaatggggttttctagatatacaatcatgtcgtctgcaaacagggacaatttgacttcctcttttcctaattgaataccctttatttccttctcctgcctaattgccctggccagaacttccaacactatgttgaataggagtggtgagagagggcatccctgtcttgtgccagttttcaaagggaatgcttccagtttttgcccattcagtatgatattggctgtgggtttgtcatagatagctcttattattttgaaatatgtcccatcaatacctaatttattgagagtttttagcatgatgtgttgttgaattttgtcaaaggccttttctgcatctattgagataatcatgtggtttttgtctttggatctgtttatatgctggattacatttattgatttgtgtatattgaaccagccttgcatcccagggatgaagcccacatgatcatggtggataagctttttgatgtgctgctggattcggtttgccagtattttattgaggaattttgcatcaatgttcatcaaggatattggtctaaaattctcttttttggttgtgtctctgcccagctttggtatcaggatgatgctggcttcataaaatgagttagggaggattccctctttttctattgattggaatagtttcagaaggaatggtaccagttcctctttgtacctctggtagaattcggctgtgaatccatctggtcctggactctttttggttggtaagctattgattattgccacaatttcagctcctgttattggtctattcagagattcaacttcttcctggtttagtcttgggagagtgtatgtgtcaaggaatttatccatttcttctagattttctagtttatttgcgtagaggtgtttgtagtaatctctgatggtagtttgtatttctgtgggattggtggtgatatcccctttatcattttttattgcgtctatttgattcttctctttttctttattagtcttgctagcggtctataaattttgttgatcctttcaaaaaaccagctcctggattcattaattttttgaagggttttttgtgtctctatttccttcagttctgctctgattttagttatttcttgccttctgctagcttttgaatgtgtttgctcttgcttttctagttcttttaattgtgatgttagggtgtcaattttggatctttcctgctttctcttgtgggcatttagtgctataaatttccctctacacactgctttgaatgtgtcccagagattctggtatgttgtgtctctgttctcgttggtttcaaagaacatctttatttctgccttcatttcgttatgtacccagtagtcattccggagcaggttgttcagtttccatgtagttgagcagttttgagtgagtttcttagttctgagttctagtttgattgcactgtggtctgagagatagtttgttataatttctgttcttttacatttgctgaggagagctttacttccaactatgtggtcaattttggaataggtgtggtgcggtgctgaaaaaaatgtatattctgttgatttggggtggagagttctgtagatgtctattaggtccgcttagtgcagagctgagttcaattcctgggtatccttgttaactttctgtctcgttgatctgtctaatgttgacagtggggtgttaaagtctcccattattaatgtgtgggagtctaagtctctttgtaggtcagatgattggcacttactgggcgcttggcactttccatactgtgtcatcggcagatagctgcatggttggtgttcgtgctggggaatgggaagttcatcggtgggacaagggacaaaatgcccccattgctttgttgtggctttaatctccctttcgaggctgagccacagcgtgctgtaggtggcgctgctgtgaagcgcagtgccagggtcacactccactcccagctctgcagaggtggagaaagaatgaaacatctcactcctggacttccactttcctgtcactgttggtgtcacctcttactggatgtcacagagcccagcccctcccacctgtccctaggaaaagcagatgccaccttggaatgtggggtttgtgtgtgcaatttactagctgggcagagaccagcaacctggagagcaggtgtctcatctaaggggacagtcacatttcacctccagccacctggaggaatttgggcctggtgatgtcagaattcttcaataaaagcctaaaatctatattttatgtgcggtcatgagatctgttaaatgttagcaacttcaggaagtttaaaaatgctgtgtggacctagaataggcaagttcttaaaggcagaaagtggaatgctagtttccagggactggggaacagggaggaatggggagttcatgtttaatgggcacagaggttttgttagggatgacgaaaaagttcgggagatggtgatggagatggtgatggtgatggagatggtgatggtgatggagatggtgatggtgatggagatggagatggtgatggagatggagatggtgatggtgatggagatggtgatggtgatggagatggagatggtgatggagatggtgatggtgatggagatggagatggtgatggtgatggagatggtgatggtgatggagatggagatggagatggtgatggtgatggtgatggagatggtgatggtgatggtgatggtgatggagatggtgatggtgatggtgatggtgatggagatggtgatggtgatggtgatggagatggtgatggtgatggagatggagatggtgatggtgatggtgatggagatggtgatggtgatgggatggtgatggagatggtgatggtgatggtgatggagatggtgatggtgatggagatggtgatggagatggtgatggtgatggagatggtgatggtgatggtgatggtgatggagatggtgatggtgatggtgatggtgatggtgatggagatggtgatggtgatggtgatggtgatgatggagatggtgatggtgatggtgatggtgatggtgatggagatggtgatggtgatggtgatggtgatggagatggtgatggtgatggtgatggagatggtgatggtgatggagatggtgatggtgatggtgatggtgatggtgatggtgatggagatgggtgatggtgatggttgcctaacatcaggaacgtgcttaatgcttctgaattgcacacaaaaatggcaagtttaatattatgtgtactttatcacaatgaaaaaagctgctgcgtgggccaagttacttgtgcaggtaagtgttctgcaggtcgttgcctgcacctcagttgtagggtgtccgtaggatgtgaggccagtccccgggcttaatgatgctttaaatcctgcctagtattcaattatttcttgtcgcttaaaaggcctaataaaattatggttttagtttacagtggtatgaatgcttagctgttggattttagtaggaaagtttgtccctttttgtttttaattttgttttacagattcacaggaatttttttttttttttttttaatgcacagaaagtttccctggacacactacccagtttcccccagtgataatatcttgggtaacatcctgtatacattcacattggtgcattcctcagagttgtcagattttgctagttttacgtgcacttgtgtatgtgtgtatttgcaattttagcacgtgtagactcttgtaaccactacaatcaagttacagaactacactaccaaggttcatctttttaaaatctttgatgttacctttttcggaacagtgaccatgagaggactttcctcccaaaattttgagaactactgaaccagaatatagtctgacactaataggtagaaatttaaccaaaggagattatgaagctctgcacttcagttaacaaatcacttctcagcttccagttccatctcagaaggaaggaaagggattaaaatccagagaccagaaatgggagcaaagtacaaggtggtgtaatcattacagaggtttcctgatgtttccaagtcagtcgtgtgttgagctgctaaactctaaagtaattttaggtggaagtgttggaaacatgctgctgaggtgatagaaaggaatccatggtcctctgttagttggaaagtatatggaatactatattctacataagatacaacactctctgtgagacaaggataaagtagattttgtcagtgaaattgtgacaagaatcgctgatgggtttagagcctaagtttgcgaggagcactggaagaaattaagattgttgagattggaaagggttagctatggggggaacaggaggaggtgactccatgacagaccaaatattcaaaggactgtgtagaagaggaaaaagactttgttagggctccagaggacagagccaggagtcagacagggccttgaactcaacccaccgagatctgcaaactttgcaggatgcaccagatgtcttgtagccatgggtcaaggggggaccctgggtaagagactgtaatagatgacctctaaggccatctcatgacatgtgtgattaatgtatgtacctgtcctctctttttgacaattctacagattattcaggacagggagttgaccaactgcaaagagtgattgacaccatcaaaaccaaccctgacgacagaagaatcatcatgtgcgcttggaatccaagaggttgaaagaaccccgtcgtcttcatttatactaaccatactcttagagggaagcaatctggttttgtgcagaggcacctgagggaggcaggaccctgggaacttcccccagccacatggttgattgtgtgacgttgggcaagtcacattttgctgcactttcaccttcagatcatgaggttgggcccagaggattttttttttttttttttttttttgagacagagttttgctctgttgcccaggctggaatgcaacggcgtgatcttggctcactgtaacctctgcctcctgggttcgagtgattctcctgcctcagcctcccaagtagctgggattacaggcatgtgccaccatgcccggctaattttgtatttttagtagagacggggtttcaccatgttggtcaggctggtcttgaactcctgacctcagatgatctgcctgcctcagcctcccaaccagatgatcttaatttgtgtatttatactcattcttacaccaaaaagggttttaaattgcctagaaactacatgtaagatgttaacattttaaatggaagcagatgaagttccagctcgctgccacctcactaacatttttaacaattatattgtaaaattcaactctaccagggtgtagagccaggtgtggtggctcacacctgtaattccaacaactccagaggccaaggcgagaggatcatttgaacccaggaatttgaggctgtagtgagtcatgatcacgccattgcactccagcctgggcaacagagtgagaccctgaatatttaaaaacaacaacaacaacaaaactctatcaggatatcataagtacttagagtgaaatacttgcatctgtaatagagacttattttttttttttttttgagacacagtctcaccctgttgcccaggctggagtgcagtggtgtgatctccgctcacggcaacctccatctcccaggttcaagtgagttcccattcctcagccccagagctgggaccacaggcgcgcgaatttttgtatttttagcagagacggggtttcactatgttggccaggctagtctcgaactcaagttggcctcaagtgatctgcccaccctggcgtcccagtgttgggatttcaggcatgagccactgtgcctggccatgtaatagagacttttaatataggagggtgtaccagaagcaccagtttcctgtggcaaacagaattattcctgctgtatttgtaatctggtgccacgaggtagcccagatcccttcagctctgatggaagagcattgcttcagccgtaaatggacacctgcagaaaccttgcaccgatggatagtctccctcagctccgtgccatcgctgcagaggctgttatggacatcactgcagcccagtggctctctctcctggtctccaccatatgagttggcttctgtttctctcctgttttactttgcctttagctgtggtctttcaaaccaccatccctccttatcttcctctgctggttcctcagatcttcctctgatggcgctgcctccatgccatgccctctgccagttctatgtggtgaacagtgagctgtcctgccagctgtaccagagatcgggagacatgggcctcggtgtgcctttcaacatcgccagctacgccctgctcacgtacatgattgcgcacatcacgggcctgaaggtgggctgtctcgggaagggtgacttgccagcctaccacactgagctcttcagttctttaatatgggaaaacaaattgcagagtttagtctctgattagcttttaaatttgatatgtgtaagtaagaaatgaaccagcttttactttgaaaccttcctcttctggaaggttttctggccctgtggtatacgcactaacagatctatacaggttgtttgtgatacagcttctatggattttctcaaaagctatgctgaggttgggtatggtggctcatgcctgtaatcccagcactttgggagactgagacaggagcaattgcttgaggtctggagttcaataccagcctgggcaacataacaagatgctgttgctacaaaaaaatggaaaagctacactaaattatttttttaaaaaaagccttgcggtgtctgcatattctaatgtttttaaatgatgttttaaagaattgaaactaacatactgttctgctttctcccccgggtttatagccaggtgactttatacacactttgggagatgcacatatttacctgaatcacatcgagccactgaaaattcaggtaagaattagatgttatacttttgggtttggtaccttctcttgataaaaggttgactgtggaacaggcatctgctcaatgctgtgtccaagataaagatgactgctccaaatgtggggcttcagtttagggagaagtggtgggcaggtgggcaggacaaggcaggcatctgcctcagcaaccatgggcacttaacatgtcaggtgctgtgaggtactaagcaccagtaccagagagggaagagccacattcaagccaggggattgtccaaaagggggcattttaactcattttaacttgaaggagaattgaagtgcaaatgtttttccttttcttttttttttgagatggagtctttctctgtcggccaggctggagtgtgccgtggtgcgatctcagctcactgcaacctccacctcccgggttcaagcaattcttctgcctcagcctcccaggtagctgggattacaggcacatgccaccacacccagctaatttttgtattattagtagagatggggtttcatcatgttggccaggctagtctcaaactcctgacttcaagtgatccacctgcctcagcctccgaaaattctggaattacaggcataagccaccaccctggccataaatattttttgttaattttacattaagtacaatatttaggtccaaacttcaaaagtctgttgaaatccctaagttatagcagccaacaattgatatgaaatggcaataaaaatgtaagttcatctgcttcatgagccttaaggaaaaaaactcagaaccagacactttttagccccttccaggttagatccaggttttaaaagttactcctttgagggagtttggctgcttttgagtggaggtgacttcaggcttattctctctggctctctgctctggtcgtttttagacatagtaataggttgtgacctgtcttcacatcctaattgccactgtctgttcatcccaggaatcctggctttcatccctttctgttcactgtccatgcatgtcatctttccttctttctgccagggacagatgggttagggattgtggaattcaagtaaacgtagagctactatgagttacagattgactgtgttcctgtctttaataaatttgccaagagtggttataagaacttacacctgatgaggcaccaggctcctgatgctgtgtaatgtcacaaaatacccctcactctcgatctgtgcaagagaacagctggttgcgctccaatcatgttacataacctacggcaaggtatcgacaggatcatactcctgtaaaatagaactttgttgatcacatcctgtgtacttgtttcacggacatgaggagcaattacaacaggtcgtacaattatggcaaaataatggccttattttgtttttagcttcagcgagaacccagacctttcccaaagctcaggattcttcgaaaagttgagaaaattgatgacttcaaagctgaagactttcagattgaagggtacaatccgcatccaactattaaaatggaaatggctgtttagggtgctttcaaaggagctcgaaggatattgtcagtctttaggggttgggctggatgccgaggtaaaagttctttttgctctaaaagaaaaaggaactaggtcaaaaatctgtccgtgacctatcagttattaatttttaaggatgttgccactggcaaatgtaactgtgccagttctttccataataaaaggctttgagttaactcactgagggtatctgacaatgctgaggttatgaacaaagtgaggagaatgaaatgtatgtgctcttagcaaaaacatgtatgtgcatttcaatcccacgtacttataaagaaggttggtgaatttcacaagctatttttggaatatttttagaatattttaagaatttcacaagctattccctcaaatctgagggagctgagtaacaccatcgatcatgatgtagagtgtggttatgaactttaaagttatagttgttttatatgttgctataataaagaagtgttctgc

SEQ ID NO: 102 - DNA, 190727 bp, Homo sapiens
ctgcccaaagtttgtcctattaggcccgccagggtactctgcgactccgggacgagggcggggccgcgctagtggttccggttcggctccagccgcccctcggctcctcgccttccccctcccgtccgccttctcccctccctcccgctcctgggaaagagagaaaccaccgctgcgggtgggtagagaagcacttggcgcctcggggaggggaccgcgcccgcctcatttgcgccttgcagcactgctggaccaggtatctgcccggcttcgtcggggttctgtaggctgaagtctgagggggtgtgtgtgtgtctgagggggttggtggggggccctttcctgggcgtgggtgggggacgccgtgatcccgggtggggcgcaggctggcgtttgtgtctgtggagggttgcgggggcggaatggaggggctgagggacacagcgggtggagagtttcggttagcggggtagaggtaggcggaggaggcgccccttccgagaaactgactctagccggtgtggaccgggagtttgccacctggagggcttactctgaaagggggagcatcccccgggagccaaaaggagggcacagatctcgtcagggtgactggggctatcccgtgcttccattgccctctttccctacccaccccgctgggacagagctggacttcgaaggttgtgggggttctgagtcgactgggtaccgcggggagccgcccttggcggagcttagggcacaagagtgggtaatgagactttcctctacccaacttccgtacgcttcccccacttcttcctttactgtttcctcgcccccacgtcctacaggagcaatgtcccccaagtgggcaggcatcacaatgtaaaagagagtggaactgggtttgttgcccctaaatgacacttaagatgtttggaaagtgcctgaatgacatattcaaccaagtctcccagctcgatattaattccggtataaattaccttagaaaagtggaattctgaaaagcatttaacaataggctagtccaggtgtagtcttgtgtagtagatgtacgtgtttatttaaaaagaatggactggggaaaccatatagatgtatcacaggtctaggcaagacatgttgaggcaaggcttttgcagcctctttcttacctgccagtaaacctgtcctaatttaaatgaagtagaaagatcctcttcatttttgtttcaatcagtgactgaatactaggtgctgtgtagtgatgtctcagaacagatatgtgaattttcagagagagaatgaatgttctgctgttgagcctgtgtcttaatcttttaaggagataattgcggtcaagtggaagtattgactttcaggcagataaatcttgggttgaacctagactatgccagttgctagttactgaccttgggcaagtcatggaacctaccagagcttttgtttcttcataagtagtatgagttaaaattcttacctgtattataagtaacatcccattttaaacggaaccacctttgaattagaagataaattattaccattaatcatacacagtcaaggcagcccagttttgtgaaacgaggtttgagataggaaagcaaccggataattttgaaaaaaaaatgcatacaataggactttcagtgtcttctcgaaattgatcgtaggtagcatgaaattcagttatcagtagtttcttaaaattcaaaataataaagtagaatatggcccatttattgaaatgagcaaaatatattttatagatttttctcagctacaccatattggtgtttatagtatggattaacacgaaatacatgaaaaagtaatgtatgtaaatcttaacatcacatgtctctttaaagagaattaaaattggggtgtaaaatagaaggtacttgttttttgtttgtttgtttgtttgtttgagacagagtcttgctctatcacccaggctggagtgcagtggcacgatctcggctcagtgcaacctctacctccaggattcaagcgattctcctgcctcagcctcctgagtagctgggatcacaggcgcctgccactacacccagctaattttttgtatttttagtagagagagggttttaccatgttggtcaggttggtcttgaactcctgaccttgtaatccatccgccttggtctcccaaagtgctgggattacaggtgtgagccaccgtgcccggcctacttgtaattttaagataaaaatcagcagcatcagcagcacctctcatctcagttagatttatgctactagaaaaacttatataatattcagaaaacaaaatcgaatacatttctgcctttaaatcattccttattacgatatagaaataaatccaagaaacatgaagtctgttttttatttatttttagtgacaaggtctttctctgtcacttaggccagaatgaatgcactggggcaattatactcactgcagcctcaaactcctgggttcaagcaaacctcctgcgtcgccctcccaaagtgttgagattacaggtgtgagccacctcacccagcccatgaagtctttttctttcttttttttttttttttttgaaatggagtctcactctgtcacccaggctggagtgtggtggcacgatctcggctcactgaaacctccacctcccaggttcaagcaattctcctgcctcagcctcctgagtagctgggattacaggcacatgccaccacatccagctaatttttttgtatttttagtagagacgaagtgtcatcatgttagccaggatggtgtctatctcctgacctcgtgatccacccgcctcagcctcccaaagtgctgggattacaggcatgagccaccgtacccggccaaagtctttatactcatttgttttgtggatttaaaataatatagttatgtgtcacctattatatgtcagattttcagctaacgtagtttgctttttgaggtgacttatagttagttattttcaaatgtaatttatactcagaggacaaaaatcaaataacttcctgtaataatagatgtttgtgagaatacaaagtttgcaattcagtttgaccttttttgagaagttcataagttttgtgtaaatttgtgagaaattttcttttctttttttttaaagacagattcttgctctgtcacctaggctggagtgcagcagcataatctctgctcattgcaatctccgcctgctaagttcaagcagttctcgcacctcagcttcctgagtagctggaactacaggcgtgtgccaccatgtccagctaatttttgtgtttttagtagagaaggcgttttgccatgttggccaggcaggtctcgaactcctgacctcaagtgatccgccagctttggcctcccaaagtgctgggattacaggcatgagccaacacacccagccctgagaaattttcaaatatatttcttccccatgtctctttgttttataaagagttgaaattaggccaggcatggtggctcatgcctgtaatcctagcaccttgggaggccgaggtgggcggatcacctgaggtcaggagtttgagaccagcctgagcaacatggagaaaccccatctctactaaaaatacaacattagtcaggcatgatggagcatgcctgtaatcccagctactcgggaggctgaggcaagagaatcgcttgaacccgggaggtggaggttgcggtgagccaagattgtgccattcactccagcctgggcaagagcaaaactccatctcaaaaaaaaaaaaaaaaaaagaagaattcaaattatgttttgtgatagttacagagttttggtaaggttatttagctttctaaatggctcttctgagagtgtaaggtctgtatatatctaagctttctgctgtgttttcttttatcttttcactttttttttgagatggagtcttgctctgtcacccatgctggagtgcagcggcactatcttggctcactgcaacctccgcctcccgggttcaagcaattctactgcctcagcctcctgaataagctggaactataggcatgcgccaccatgctggctaatttttgtatttttagtagaaacggtgttggccatgttggccaggcggctctctaactcgtgacctcaggtgatccacccaccttggcctcccaaggtgctgggattacaggtgtgaactgccctgcccggcctgctgtgttttctcgtatcatttttttatcatcctttaaatcttaaagttgagatcatatgctttggtaaagctctcagaagctcccactttttcccctgtcttcttctcaaactataatactgtattaatatttttaaaaatcttttttgtttttgagacggagtttctgttacccaggctggagtgcccaggctcagcttactgcagcctctgcccctcaggttcaagcgcccctcctgcctcagtctcccgattagctgggattacaggtgtgcgccagcatacctggctaatttttgtatttttagtggacatggggttttgccatgttggccacgctggtcttgaactcctggcctcaagtgattggcccgcctcagcctctcaaagtgctgggactacaggcgtgagccaccgtgcctggcccgataatctattaattttgatataagagatagtatactagctgctagagtaaaaaattctatcttaattgtgtgcaatgaatagagacggttagagatttctcaatcaccacttcctctcaaagtctgtggccgttccaaggatctttgcagttgtcagttatggaatttgcttgtcaggaaatctaaaaatgactaaacctttgtttaatatctatctcttggatgacctcagaaagttttaggaaagattgggaaggtttatatatgtaccatatactagaattagataatgaacaaaatacagctgaatttattggcgctatacaatcaggagtgagttactgtgaaaatgttattaaaaagtccaggcggtgctttctttttactcaaaccaaatgagtattcttccagagctcatttttattttaaagcatatttcttttatggagctgtgatttagtctctaataaggataaataatcattatataaaaaaaggctggtgtcatagattttagtactacatattgatagaaactgcttcagtggttttagataagtgtattttccggaaataacttttgaatttgtggaatgatagtttttctctttttaacagttaacttgtctctactcatttctgcccaatatagaagctctgagaagctgggaggaaaaaaaaaaagaaaaagaatggatttacttcagaattaccattttaagttgtggagattacttatttggagagcaaaattggattttgacattattgggattgtgttcaagatggactcaggaaaaaaaatttagatgccatctgtttcagattccttctctcccaaccccttttatgttttatggctttgagttcatcagattattttgtaaaaataaaaatcctcagtagatttaggttatataatatcagctctatcagtgaacatgtaaccaaagatcttgcatttttatattgagttatacaggatgatgacagatactgtttaaagttaattgttatttcaaactatatgaatggtaacttcatgcatcttttaattctcactgttcacttgataaaccaattttttttttttggagacagagtcttgctctgttgctcaggctggagtgcagtggcgtgatcttggctcactgcaagctccatctcccgggttcacgccattctcctgcctcagcctccggagtagctgggactacaggtgcctgccaccacacccggctaattttttttctttttgtatttttagtagagacggggtttcaccgtgttagccaggatggtctcgatctcctgaccttgtgatccgcccgccttggcctcccaaagtgctgggattacaggtgtgagccaccgcgaccagccgataaaaccatttttataagtagtatttaacatagtccacttgttgatggaagcttaaaaaattgataaaaagatattttagattaaatctttattcacttgatgtcttaaaaccagaaaagaagcttcttctgaggatttttaacttaaaacaagcttacttaaatttactctttcagtagtggattttatcttaccctctgtgccagttgcttagttttcatctaaatgtgtgcacatagttggcacttttcatttgggatttttttaatttttaattttttttttttttttaatttttggagacgagggtctcagtgtgttgctcaggctggtcttgaactcctgagctcaagtgatccttccacctcaacctcctgagtagctgggattacaggtgctaaccaccatgctaggttcattttggatcttaataaattctgacggcaggcttttgggttactaaactgtaaaagaccaaacttgctgaggttataaccttaacttagcggaccagaaagactcagtcatctcagagaaattgaaatagcactagtgtggtatcccagaaatggcctaaagagagagccatctggatagaagccatgctttgtctgcagcaggaatgttctgatgagatagaaagacagatggactgtccccacactaatgtagtctgtccctcacccagaagctccaagtgggcagtgtagttatagtgggggttggggtgctagggatgggaattattctttaataatttctcacccatcacattggaggtgtgggtatactgggtagagggatattctcttagtttttgccttgtccagagatgtcgggtgaagaggtagccattgcccttgccacgaaaagggagaagcctgggtgccgagtttgatgtctccatcaaaatgctacataaatttgccagggaacaatagcattggatccccatggatttctgctgcttatacattctaactccttagcctataaaaaggggtatttacgacttcctgaatgaaagttatacattttcttctgtcttgatacttttttttttttttttttgaggtggagtttcgctctcgttgcccaggctggagtacagtggcgtgatctcggctcactgcaacctccacattccgggttcaggcaattctcttgcctcagactcctgagtagctggaattacaggtgcccgctacctaccatgtccagctaattttttgtatttttagtagagatggggtttcaccacgttggccaggctggtctcgaactcctgacctcaggtgatctgccctcctcagcctcccaaagtgctgggattacaggtgtgagccaccgcgccttgccaatatgttttaaaatacactttaatttctctgttgaccataatgaatgatgtgaaatttttttcttttcttcctttttttggtgtttgagtatccatgataatcaccagatctcattttagctttaggataaattgctaaccacagctgtgatcaagccgcttcccagctggaattcttttccatttcctagaggtcactctctgatgtgggtgctggtgagcagagagaaatgactaatgccaggaaaaggcaagaggattaaaatctcttaattttgtttgcactttgctaaaatttctgtagtctacagtggcaatatttactctttgagattgtgtatgccctattgtgtttttttcattaatttttttttgaatacttttagatttctggaataagagagcagatagtacatagagttcagtgtgcttctctcctccatcccccagtttcccctattattaacatcttgcattagtgtggtacatgtgttacaattaatgaaataatattgatacattattgttaactatagcatctggtttacactaaggttcactctgcattgtacattctgtgggttttgacaaatgcataatgacacgtatccaccattacagtttcctacacatagtttcaccatcctaaaaatcctgtgtgcttcacatccctcctctcctgcctgaattactggcagacactgaccattttactgtctctatagtattgccttttccaaaatgtcatatagttagaatcatataacatagagctttttaagattgttttttttttcacttagcaatatgcgttgaatgttcttcgtgtcttttttttttttttgacacagagttgtgctctgtcgccaggctggagtgcagtggcgggatatcagctcactgaaacctccgcctcctgggttcaagcgattcccctgcctcagcctcccgaatagctgggattacaggcacatgccaccactcctggctaattttttgtattttagtagagaccgggtttcaccatgttggccaagatggtctcgatctcctgacctcgtgatctgctcgcctcagcctcccaaagtgctgggattacaggtaggagccactgtgcctggcctcttcatgtttttttgtggcttcatagctcatttctttttattgcaggacaatttttcttttctcttttcttttctgtacattttccttccttccttccttccttccttctttccttgtttctttctttttttttttttttaagacggagtgttgctatgttgaccaggctggccttgaattcctgggctcaagcgatcctcctgcttcagcctcccgagtagcttggactacaggtgcaagccagcatacccagttggtattgctgaataattttctgttgtatagatgtgccacaatttgttgatcccttcaccatttgaaggacatctttgttgcttctagtttttgataatgatgaataaagctggtataaacatacatgtgtaggtttttctatcattaaaagttttcagctcttttgagtaaatacccaggagtgtgattgctggatcttatgataagactatttaatttggtaagaaattgtcaaactgtttcccaaagtggctataccattttgtattcctacgagtaatgaataacaagagttcccgttgtttcacgtcctcactagcatttcgtattgtctctttttttgtattttactcgttatctaatagatatgtagtagtatcttgttttaatttgcagttctctatgatgttgggcatctttttgtatgtttgacatttctatacctttttggatgaggtatctgttcaggtcttttgcccattttaaaataaggttgtttgcttcttgttgagttttaagtggtcattgtgtattttggatacaaatccttaatcagatatattttttgcaaatattttttccagtctatggcttgtctttttattctcttaatagtgcctttcatagtgcagaagtttttaataaggtccaagttaacctcttctctttcattgataatgcttttagtgttatatctgaaaactcatttccagccaggtgtggtggctcacacctgtaatctcagcactttggggggccaaggcaggcagatcacctgaggtcaggggttcgagaccagcatggccaatgtggtgaaacctcatttctactaaaaatacaaaaattagccgggtgtggtggtgtgcgtctgtaatcccagctactcaggaggctgaggcaggagaatcacttgaacctgggaggcggaatttgcagtgagctgagatcgcaccattgtactcctgtctgggcaacaagagcaaacctatgtctcaaaataaataaataaataaataaataaataaataaataaataaataaataaaaactcgtttccaaacccaaggtcacttacattttctcctatttatcttcaagaattttttatcgttttgtagtttacatttagttataaggtttattttaagttagtttttttttttggaaaggtgtaaggaatatgtgtatatgcatgcacatgggtgaccaattgttttttttttaatttattttttaattaaaaaaaataaacagagatgaggtctcactatattgcccagtctggtcttgaattcctgatctgcccacctttgcctccaaaagtgctgggattgtaagtgtgagccactgcatccagtcgtgaccaattggtttatgcaaattttttctgccgggtgcagtggctcacactcagcactttggtaggctgaggtgggcagatcacgaggtcagaagatcaagaccatcctggccaacaaggtgaaaccccgtttctactaaaaatacaaaaattagctgggtgtggtggcgcatgcctgtagtcctagctacttgggaggctgagacaggagaatcgcttaaccagggagtaggaggttgcagtgagccgagattgtgccactgcactccagcctagcgacagagtgagactccatctcaaaaaaaaataagtttttttttctattctacaagcgttaataaggatgttcttaaagaaactaaaacaaatgaaataatctgtgggagttatttttaaatgagagtttcctaacgttctcgaatgtaattagaagcattgttcagagtgtggttttccctttcaagaagattgattttaggttattaggtcttaattgacaactgcttaattatttcatacatgtattagagtcttaggaagtatgagctaaatgtggcacagtcatgtgatgtttcaggttgtaaaggggcttgataggaaatttaaatgcagaatttttcaactgtcactaaggacaagagcctttgtcacttgggttttattgttgcgaagggtttcaactatacagattttgatcaccctctctagtgtttgctgctgcttattacacttgttgaagactatctagaagcttgagctggcaaaaactgaataggaagcgcttccatgggtactgctgtactttcctgaatattttcaattctgtctcaggctgagaatcttgattctaaaagtaatagaatgctgtcctgagacattttattctcatgtagcctgagtactaattgttagctagaatcctctttcacttggctttataactgtcctgtcctgtacttctagaacagcttctattttctaaaacattttaaccttaattggtataatgacatctaaatattctggtcatctagggtatgatgcaagaattgtttaataactctgtttggtgagttttgtttgttttttcacctagttaaataagtcaactaggaactgtctgtgtgaaagcacttagattctccagagatacattatctccaaatcaatcaatatgaaggctcactttgtctttaatgggatccatctggttaatgctgtgtttcttgagtttcatagattatgaaatcataaagctaaaagaaaatatggagatggtctagttagaccctttcattttacagctgagactacttaagtgcagagaggctaagtgacttgctcaagattgtacagctaattaatgagtcacactggaattcagtgtagtcttatttctgatataactgtgctaattttttcattgcagttagtgaagaaattatggatttataagaagtaaattttccaggaggtttaagtggacttaaattaagtatttcttataattgaaatgtgtatatttctttcaggtaccaggtgtcactggatttctatgagcaaatttgttatgtttcacgttccagatagaaatcagccaatttaaaaatagtggtgaagttattatagcctatatttaatgagcacacatttggctgcattaaaatgaatcttaatgtattttttgcacagcggagataatctgttaatatttaatgccataaagcaacaatggaattctgctttcatgtggtgtatttataaaactagagtagagtgttatgtaaaaactaaaagtacagattaatttaatatgcatctggtgaattcagggcttgaaggatgcacatctgttgagaaaacaaatcatagaactattcagagtttcagcatctttaaatatgtgcgctttgattctgttttaactgttttgaaacagtctttaatggatttagaaaaggccatttgctctaaggaagcaactgtgaagccacttacaatgctattattcattttattattttttaaagcatttttatacattactatttttctttccaatttatttattggggaaggaaggggctaaatgactcaccataacaaaatgagtttgttgcagaaccatgtttaaaaagaaaggaatgtaatttgctgaattcaatagattagaaatattttaaggctttgtcaaaataatacgccaaaaaatattttaaggctctgaattctaatttgaactcacaatcagtgaagaaataatcagtttctactgtgtattcatcaccatactagagctgtggtaatatagaaattgaagatatagtctatatcttcagcttctatattaccgcagctctagtatggtgatatagattatatcttcaatttcgagttgaaagaaacaagacttaaaatgaaaggtagagaataacacagatatgtaatgaagcaaaaacttgatctaatctgtcaacattacagtaatttagaggggagaaaatccagtgagtattcacaattctgacaggaaggagattaaagttaaagtagtggatctcaactctgactgctccttagaatcacttgggaaaacttaatcaaaaatcagatgaatcagaatcttgggtgaggtgcatctgcagtttttaaaagctttcccagatgtttgtaatgtgcaggcagtgttaagaatcacaggcttaaaggctgggtttgatttggaaaagcaagaaagtgtactaggccagcacagggtgggagaattggccacagtctgtgaaaagattaatccagtcaaagcagtgtgtgctaggtggggaggaaggagaaataagcctacagaggcagaatggggtctattttagaagaggtgtgtgtgtgtgtgtgtgtgtgtgtgttggagttttgctcttgttgccctggctggagtgcaatggcacgatctcagctcgctgcaacctctgcctcctgggttcaagcgattctcctgccttggcctcccgaatagctgggattacaggcatgcgccaccacaccccgctaattttgtatttttaatagaggtagggtttctccatgttggtcaggctggtcaagatagaatagtacttttcaaaatgtggtttcttgaccagcagcagcagcagcagcgtctcctggaaatttattataaatgcagattttaaggccctggtcccatacctactgaattggaaactctagactggggtccagcaatctgtattttaacaagcatgccagatgattctgatgtacactcaaagtttgggaactgctgttaagagaggataatgaaagttaggcagaggaaattagatttgatgtgctcataagcagggatccatagaagatttttaatttttattttttaatcatttacttattttccatgtatccaaggcacgaaccagccatgggcacagaccaagagccaagatgggataaacaagggttgctttatccctggatgacatgagatggacatcaccacattaaaggttcttaagctagagagtaacaggaagtatctgtatgtattcaaggtaaatctgatggtgatctgcacaatactttggattactaaaagatatgaatgaagtgggctggttgaggaaatgcagacataatctagtggatgtaatctagcagcagtaaaggcttgttctagggaagtattagtgagaaaacataatactaataatagtgatggcaatttattgagagtttacataacaagtggcatgttaaatgcattttattctcacagcaagccactgaagtgtggctattccagttttacagatcagcaaatgaggcagagaaaggaaggttacttctgaagttcacactgctggtatgtggtggagccaggatgtcaagctcaagaatctctgcctctaaagcctcttgaagaaacagctaataatatctggagagccacgagaaaaaggaaaatacttgagtctgaaaagttttaatcctacttgacagagtgcaaggggacgtcactgtcggaagggaaatagtgcatacagtgggtaacaagggaagtcatttagccagttgggaacaaaccatcttgtaaaagtgaccatgaggaataaccgatggaaatttttgtatagtgctttttcagtataaagttcgaagtaactttcaatagttgagtttataggttttgtttgttcttgctcatgctgactaaattagaagagtcacctcatcccgcttttaaaaagggtcttttagattttagagtagatagtctgtgagtaagtcatgcccaagaagcttactgtaataccacttttccctctctaagcatcttagtcttaagacagtttaagctgagtgtggtggcttatggaggatcacttgaggccaggagttcaagatcagcttgggcaacatagcaagactctgtctctataaaaaataaaaaaaaattagctgggtgtcatggcacgagctggtagtctcagctactcaagagattgaggcaagaggattgcttgagcccaggagtttgaggctgcagtgagatctgatcatgccactacactccagcctgagtgacagggcaagatgtctttgaaaccaaccaaccaaccaacagaagaaataaatgacagtttaataaatatttcaggccgggcactgtggctcacgcctgtattcccagcactttgggaggccaaggcgggtggatcatgaggtcaggagattgagaccatcctggccaatgtagtgaaaccccggctctactaaaaagataaaaattggccgggcgcggtggctcacgcctgtaatcccagcactttgggaggccgaggcgggtggatcatgaggtcaagagattgagaccatcctggctaacaaggtgaaaccccgtctctactaaaaatacaaaaaattacccgggcgcggtggcgggcgcctgtagtcccagctactcgggaggctgaggcaggagaatggcgtgaacccgggaagcggagcttgcagtgagccgagattgcgccactgcagtccgcagtccggcctgggcgacagagcgagactccgtctcaaaaaaaaaaaaaaaaaaaaaaaaaaagataaaaattagctggacgtggtggtgtttttgagacagtgcctcactctattgcccaggttggagtgccgtggtgtgatcatggctcactgcagtaccaactacccaggctttaagtgatcctcccacctcagcctcctaagtagctgagaccacaggcacacaccaccatgcctggctaatttttaaaaaactatctgtagagacaggattttgccatattgcccagtctggtcttgagctcctgggctcaagtgatcctctggcctcggccccccaaagtgctgggattacaggcatgagccaacatacatgaccttaaagtggtttcacagaagttctacctagcaacttcattagccctttgctgcaaggtaattaggctgcccagaataaaactggactttactgagggagtggtgattctgggaaagccacctgcagtctctaccacatcatataacaataaaaggtttagtttaccaggaagatactagaattctgttacttataccagataatacaggttcaacatacataaacctacataacaactacaaggagaaatttataaattcaccattatattagaatagatgtttttgacattaaaacaatacttcctgccagcagagatgtgctaaagaaaaaaaaatcattaaaacaacacaacaagacagagctattgggtgaatatagaacattgtactcaagttttaaagaattagtttcatacagttactactatttgcagatatagttactttgtggaatccaaaatttctgtaatgcgagaggtaacaaccttcaaagtagccctgaaaatctcaacaaattcaaagaatatgtattctatagaccaaaccttcgatgacagtgcaaactaaattaggactcagttttttaaaaaaatgacctttaaaaatgtttggaaatttaaaagaacacatctaaataactcttgaggttacaaaagaaataatgatagaggtttaccaatgcataacactgaatgttaattaaaaaaacaacatcaaaattgatggatgcaacttagtggttcttgggcatagcatatagtcaagtttcataaatactctgtgagagtttgaaaagaccattctctagttgagggcagtggtattaatagaggaaaagagcctcagaaattgagaactgtcagtcactcctcttgatttaatattcgtatttaaggccttgtgcaatttgtcctctgacagttgtcagtgggcactactgctcctcctgtttcttttgctttaatcttaattacataattaaagttctcttattagacactagtggttctaaaatgttagcatgtattggaattttctggagggtttgttaaaacacagattgctggctgggctcatgtctgtaatcccagcactttgggaggccgaggcgggtggatcacctgaggtcaggagtttgagaccagctgggccaacatggcgaatccctgtctctactaaaaatacagaaattagccgggcgtggtggtgggtgcctgtaatcccagctacttgggaggctgaggcaggagaatcgcttgaacctgggaggcagaggttgcagtgagcggagattgtgccactgcactcccccttgggcgagagagtgagactctacctcaaaacaacaacaacaataacaacaaaaaacaaaaaaacacagattgctggtcctcaccccctgaatttctgattcagctcatctggggtagggcctccaaatttccattttcagcagatttgcagatgatgttcatgctggtgacctagggacaatgctttgagaatcactgtactagagattacattcacttgactgtatcccttgtaactgctaattcttttcctgtagccccttttctctcctccttaactttttcccttcagaatcctgcactttaactctccccttttcttggaagtactttttttttgagatggagtttcgctcttgttgcccaggctgtagtgcagtggcgtgatcttggctcactgctatctccacctcctgggtccaagccattcttctgcctcagcctctcaagtagctgtgattacaggcatgcagcaccatccttggctaattttgtatttttagtagagacggggtttcaccatgttggtcaggctggtctcgaactcccaacttcaggtgatccaccagcttccacctcccaaagtgctgggattacaggtgtaagctatcgcgcccggccagaagtgttttttttttttttttttttttttttttgagaccgagtttcactcttgttgcccaggctggagtgcagtggcacgatctcagctcaccacaacctgcacctcctaggttcaagcgattctcctgcctcagcttcctgcgtagctgggattatagacatgtaccaccacacccagctaattttgtatttttagtagagatgggagtttctctgtgttggtcaggctagtctcgaactcctgacctcaggtgatctgcctgtcttggcctcccaatgtgctgggattacaggtgtgagccaccgcgccgggctcaagtgtttttaaccatcaagttgttagatgtcccatgcctatgcttacttagaaaatggttcttgcacatctatagaagtcctaatcttgctatcatactaaatatcacttcacatccattaagatagctattaaaatacacacacagaaagtaaaaaagtagtgaggatgtggagaaattggaactctatttattgctggtgggaatataaaatgccgcagccattgtggaaaacagcttggcagtttctcgaaaggttacacataggactaccatatagacccagcagtcctctcttaggcatatatctaaaagaatcaaaaacagggtttgaaacagatgtttgtacagtacctttataacagcattcataatagccaaccaagcgcctgttgacagatgagtgcataaacaatatgtagtatatacatacaaaggaaggaaattctgacacatgctatgacgtgggtaaactttgaaaacatgcttagtataataagtcagacacaggacaaatattgcatgatttcacttatgagctacctaggatagacaaattcaaagacaaagtagaatagaggttatcaggggctgatggggcagagaaaagcagagctattgtttaatgggtacagaattaatgttgaggataatgagaatattttgggtatagatactggagactgttacacaatattgtgagtgtgttttcatgccactgaattgtacatttacaaaaggttaaattataaatattatatatattttatcacagtaaaaaacaaagccaggtgggttcacatctgtaatcccagagctttgggaagctgaggtgggaggattacttgaggctaagagtttgagaccggcctaggcaacataatgagacccattctacaaaaaataaaataggcatggtggtacctgtagtcctagctgttcgggaggctgaagtggtagaatagcttgaacccaggagttcgaggctgcagtgagctatcatggtacgactgcatttcagcctgggtggcagagcaagattctgtctcttaaaacagacaaaaatgttagtatattactggaaaaacttattagaagtcttttttggtgatgaagtttcactctcatttttttgtcatatgtttctatgagttctgcttgcttttgtttttttgttttgttttgtttgagacggagtctcgctctgttgcccaggctggcatacagtggcaagatctcagctcacagcaacctccacctcccaggttcaagcgattctcctgcctcagcctcctgagtagctgggattacaggtgcctgccactgcgcctggataatttttgtatttttagtagagatggggtttcaccatgttggccaggctggtcttgaactcctgacctcaggtgatttacccgtcttggcctcctgaagtgctgggattacaggtgtgagccactgcgcccggccgagttctgcttttttcaaaataacaagcatgtgtttctgaatcagaaaaaagtaaataatacgttaaaaagacatatgtgaatatttataaaatatgtttatgtgaaggattttctgtaatgtaaatctcactagtgaaaatttttatattacttgagtagatgatttttccatagaatcgtgactaaaactgagttttccatgaactgttactaacctgtaaacttcctctctaatgaaagttatattttccttggttatagatgctttctagtttgttatatctatgtcagttattttgaatctcttacattttcagatcaaaaattaattattattgttatttttttgtttgagatggagtctttctaagttgcccaggctggtcatgaactcctgggctcaaagtgatcctcccacctcagtctcttgagtagctgggattataggcacatagcacaggacctgccaaaattattatttaaatttatcaattaagcatgttcagtgacataggtaagtattgagtgcaggtagcatttatgctgacttcagtagaattcctgggctttaaaacaaataagaaaggaagaaaggaagtatgtagagtgtggcttatacactttgaggacattgtggttttgctttgtaattttcttgtgaatagaataaggagtgaaatgagagagatcgaatctagttaatcaagataatttgtcaagtaaatttcagttacttgaaaacagtcaattcaattttacatttgtttactctgttttgggcatggtgctttgaacggtttaggtacgtaagtcagagagcagtccctagtcgcatagagttccatagaatagtttggtaggcagataggtaaaaaatagccacataaatcgatagatggatatatgaattaagatgaatattattcattcatgctccataaatttattgagcaactgttatactatgtgttaggcctagtgtaggtactgggggtatagtgacaaacaggaaatatttgtgcttgcattgaaaaagattactgggatgttgcaggtaaattttattttctccttattcttaggtttttgaaatgaaatgactaggacaatacaggaacaacagcaagaatttgttgactttcatccttagagaactcaagtgaggatgtagcttgtatgacagtctagtattttcttgatcaacagaaaaggttgaaattctaattgtttccatcaacattagaatgattctttactactaagcttgtgatagggtttttaaaaaataataattgttaaagttggttattaaagcttaaaattcaaatcatcaatcacaaagtaaatattcatgaaagaaatatactgattctttaggaggtagatagtgatgaggcagttaatggaaaaatcaagtcagtaatttcttgggacaatcatcaaggctgcctttttgtgtttctataggcagtcatggtgactgactttgttaccaaagtgcagttattaaagcccttattttttttaaggaaaagtataacaattgaaagaaaaatgaggatcaggacctttgtggtactttatttttatgccagtaagaagtgtctgtggctcctcaatactggcttcatcttgattgttttattatttattttccttgagtagggaaggaaagccatcttctcagataaggttatgtttttattgttttagcctagctttgcttaaaaaaatttttagtgaggtagacaaaactctttatcaggtattgaaatatgtttttcctaaaagcatgtattaggctacccttctcacacaggatgtgttctgaaatgacagatagatttgcagcagattctcattttctttgtagattatgtgaactgagcagtacttgcaaaataagtcaataatctgaatctttgtagtaactcttctggagttattagggaaaccaaaaatggaaataatattgtggtctctaagcttactctaaattaggtagttatagaagtacactttttggtgaaggtaagtttaactgctgtcatctgttagataaaacaggggtcctgaagctctgggccacagaccagtagtggtccatggccctttaggaaccgtgctgcatagcaggaagtgagtggcaggtgagtggcaggtgagtgcgtgaagcttcatctgtatttaaagccactccccatcacttgcattactgcccgagcgccacctcctgtcagatcaatggcagcattagattctcataggagcgtgaaccctgttgtgaactgcacgtgagagggatgtaggttatgcactccttatgagaatctaatgcctgatgattggccagagtctcccatcacttgcagaaaggaccatccagttgcaggaaaacaagctcagggctcccactgattctacattatggtgagttgaataattatttcattgcatagtacaatgtaataataatggaaattaagtgcataataaatgtagtgtgcttgaatcatccctaaaccattcccccctgccctccacccccagtctgtggaaaaattgtcttctgtaaaactggtccttgtgccaaaaaggttgaggactgctgagataaaagattttaggctgggcacggtggctcactcctgtaatcccagcactttggcaggctgaggcaggcatatcacttaaggtcaggagttcaagaccagcctggccaacatggtgaaacaccatctctactgaaatacaaaaaaattagctgggcgtggtggtcagtgcatgcctgtaatgaatgattcatgtggtaatgagaagactgtatatcttgcagttcttgggtagaatgttcagtaaatatctgttaggtccatttgttctcaagtgcagtttaaatccagtgtttctttgttgactttgtgtctctaagatctatctagtgctcgaagatctatctatctagggctatcagtggagtgttgaagtcccccattattattgtgttgctgtctctgtcttttcttaggtctagtagtaattgttctatgaatctagatgctccagaattaggtacatatatgtttaagattgtaaaatcttgttaaattgatccttttatcattgtataatgactttgtctttttaaactgttgtttctttaaagtctgttttatctgatgtaagaacagctattacttcttgcttttggtttccgtttgcatgtaggaatccttaggtgttaggtgagcctcttgaagacagcaaatacttggtttccaattttttatccattttgccaatttgtaccttttaagtggcgcatttaagaccatttacattcagcattaatactgagatgtgaggtactgctttagtcatcatgttgattgttacctagacactttgttgtcctcattatgttattttatagaccttgtgagttttgtgctttcaggagcttctattctggtacatattgaccttttttttttttttttttttttttttgagatggtgtctcactgtgttgcccaggctggtcttgaactcctggattcaagtaatcctcccacctcagcctcccaaagtgctgggattacaggcatgagccactgtgcccagccattgtttcaagatttagacctccttttagcattcctttttttttttttttttttttttttgagatggagtctcactcttgttgctcagtctggagtgcaatggcgcaatctgggctgactgcaaccttggcctcctgggttcaagtgattcacctgtctcagcctcccgagtagctggcattacaggtgcccgccaccatacctggctaagttttgtatttttagtagagacaggatttcaccatgttggctaggctggtcttgaactcctaacctcaggtgatccatctaccttggcctcccaaagtgctgggattacaggcatgggccactgctcccagctagtcagggaaattttcttcaattattccctcaaatcagttttccaaactttctggtttttcttttctctcaggaacaccagtgattcttaggtttgaacattttacataatctcatttatcttgtgggctaaaaattcttttaaaaaattttatgtaactttaaacataaaagtaagatattttgcttatatgagcaagaaaaattttaaattatttttcaactactttttttttgtttttgtttttttttaaattgttttgtgatttgggtttttttattttattttattttatttttaattatactttaagttttagggtacatgtgcacattttgcaggttagttacatatgtatacatgtgtcatgctggtgcgctgcacccactaactcgtcatctagcattaggtatatctcccaatgctatccctcccccctccccccaccccatcacagtccccagagtgtgatattccccttcctgtgtccatgtgatctcattgttcaattcccacctatgagtgagaatatgcggtgtttggttttttgttcttgtgatagtttactgagaatgatggtttccagtttcatccatgtccctacaaaggacatgaactcatcattttttatggctgcatagtattccatgatgtatatgtgccacattttcttaatccagtctatcattgttggacatttgggttggttccaagtctttgccattgtgaataatgccgcaataaacatacgtgtgcatgtgtctttatagcagcatgatttatagtcatttgggtatatacccagtaatgggatggctgggtcaaatggtatttctagttctagatccctgaggaatcgccacactgacttccacaatggttgaactagtttacagtcccaccaacagtgtaaaagtgttcctatttctccacatcctctccagcacctgttgtttcctgactttttaatgatattcattctaactggtgtgagatggtatctcattgtggttttgatttgcatttctctgatggccagtgatgatgagcattttttcatgtgttttttggctgcataaatgtcttcttttgagaagtgtctgttcatgtccttcgcccactttttgatggggttgtttttttcttgtaaatttgtttgagttcattgtagattctggatattagccctttgtcggatgagtaggttgcgaaaattttctcccatgttgtaggttgcctgttcactctgatggtagtttcttttgctgtgcagaagctctttagtttaattagatcccatttgtcaattttggcttttgttgccattgcttttggtgttttggacatgaagtccttgcccatgcctatgtcctgaatggtaatgcctaggttttcttctagggtttttatggttttaggtctaacatttaaatctttaatccatcttgaattgatttttgtataaggtgtaaggaagggatccagtttcagctttctacatatggctagccagttttcccagcaccatttattaaatagggaatcctttccccattgcttgtttttctcaggtttgtcaaagatcagatagttgtaggtatgcggcgttatttctgagggctctgttctgttccattgatctatatctctgttttggtactagtaccatgctgttttggttactgtagccttgtagtatagtttgaagtcaggtagtgtgatgcctccagctttgttcttttggcttaggattgacttggcaatgcgggctcttttttggttccatatgaactttaaagtagttttttccaattctgtgaagaaagtcattggtagtttgatggggatggcattgaatctgtaaattaccttgggcagtatggccattttcactatattgattcttcctacccatgagcatggaatgttcttccatttgtttgtatcctcttttatttccttgagcagtggtttgtagttctccttgaagaggtccttcacatcccttgtaagttggattcctaggtattttattctctttgaagcaattgtgaatgggagttcactcatgatttggctctctgtttgtctgttgttggtgtataagaatgcttgtgatttttgtacattgattttgtatcctgagactttgctgaagttgcttatcagcttaaggagattttgggctgagacgatggggttttctagataaacaatcatgtcgtctgcaaacagggacaatttgacttcctcttttcctaattgaataccttttatttccttctcctgcctgattgccctggccagaacttccaacactatgttgaataggagcagtgagagagggcatccctgtcttgtgccagttttcaaagggaatgcttccagtttttgcccattcagtatgatattggctgtgggtttgtcatagatagctcttattattttgaaatacgtcccatcaatacctaatttattgagagtttttagcatgaagggttgttgaattttgtcaaaggccttttctgcatctattgagataatcatgtggtttttgtctttggctctgtttatatgctggattgcatttattgctttgcgtatattgaaccagccttgcatcccagggatgaagcccacttgatcatggtggataagctttttgatgtgctgctggattcggtttgccagtattttattgaggatttttgcatcaatgttcatcaaggatattggtctaaaattctcttttttggttgtgtctctgcccggctttggtatcagaatgatgctggcctcataaaatgagttagggaggattccctctttttctattgattggaatagtttcagaaggaatggtaccagttcctccttgtacctctggtagaattcggctgtgaatccatctggtcctggactctttttggttggtaaactattgattattgccacaatttcagctcctgttactggtctattcagagattcaacttcttcctggtctagtcttgggagagtgtatgtgtcgaggaatgtatccatttcttctagattttctagtttatttgtgtagaggtgtttgtagtattctctgatggtagtttgtatttctgtgggatcggtggtgatatcccctttatcattttttattgtgtctatttgattcttctctctttttttctttattagtcttgctagcggtctatcaattttgttgatcctttcaaaaaaccagctcctggattcattgattttttgaagggttttttgtgtctctatttccttcagttctgctctgattttagttatttcttgccttctgctagcttttgaatgtgtttgctcttgcttttctagttcttttaattgtgatgttaggatgtcaattttggatctttcctgctttctcttgtgggcatttagtgctataaatttccctctacacactgctttgaatgcatcccagagattctggtatgttgtgtctttgttctcgttggtttcaaagaacatctttatttctgccttcatttcgttatgtacccagtagtcattcaggagcaggttgttcagtttccatgtagttgagtggctttgagtgagattcttaatcctgagttctagtttgattgcactgtggtctgagagatagtttgttgtaatttctgttcttttacatttgctgaggagagttttacttccaactatgtggtcaattttggaataggtgtggtgtggtgctgaaaaaaatgtatattctgttgatttgggatggagagttctgtagatgtctgttaggtccgcttggtgcagagctgagttcaattcctgggtatccttgttgactttctgtctcgttgatctgtctaatgttgacagtagggtgttaaagtctcccattattaatgtgtgggagtctaagtctctttgtaggtcactcaggacttgctttatgaatctgggtgctcctgtattgggtgcatatatatttaggatagttagctcctcttgttgaattcatccctttaccattatgtaatggccttctttgtctcttttgatctttgttggtttaaagtctgttttatcagagactaggattgcaacccctgcctttttttgttttccatttgcttggtagatcttcctccatccttttattttgagcctatgtgtgtctctgcacgtgagatgggtttcctgaatacagcacactgatgggtcttgactctttatccaacttgccagtctgtgtcttttaattggagaatttagtccatttacatttaaagttaatattgttatgtgtgaatttgatcctgtcattatgatgttagctggtgattttgctcgttagttgatgcagtttcttcctagtctcgatggtctttacattttggcatgattttgcagcggctggtaccggttgttcctttccatgtttagcgcttccttcaggagctcttttagggcaggcctggtggtgacaaaatctctcagcatttgcttgtctgtaaagtattttatttctccttcacttatgaagcttagtttggctggatatgaaattctgggttgaaaattcttttctttaagaatgttgaatattggccccactctcttctggcttgtagggtttctgccgagagatccgctgttagtctgatgggcttccctttgagggtaacccgacctttctctctggctgcccttaacattttttccttcatttcaactttggtgaatctgacaattatgtgtcttggagttgctcttctcgaggagtatctttgtggcgttctctgtatttcctgaatctgaacgttggcctgccttgctagattggggaagttctcctgtataatatcctgcagagtgttttccaacttggttccattctccccatcactttcaggtacaccaatcagacgtagatttggtcttttcacatagtcccatatttcttggaggctttgctcatttctttttattcttttttctctaaacttcccttctcgcttcatttcattcatttcatcttccattgctgataccctttcttccagttgatcgcatcggctcctgaggcttctgcattcttcacgtagttctcgagccttggttttcagctccatcagctcctttaagcacttctctgtattggttattctagttatacattcttctaaatttttttcaaagttttcaacttctttgcctttggtttgaatgtcctcccgtagctcagagtaatttgatcgtctgaagccttcttctctcacctcgtcaaaatcattctccatacagctttgttccgttgctggtgaggaactgcgttcctttggaggaggagaggcgctctgcgttttagagtttccagtttttctgttctgttttttccccatctttgtggttttatctacttttggtctttgatgatggtgatgtacagatgggttttcggtgtggatgtcctttctgtttgttagttttccttctaacagacaggaccctcagctgcaggtctgttggaataccctgcagtgtgaggtgtcagtgtgcccctgctggggagtgcctcccagttaggctgctcgggggtcaggggtcagggacccacttgaggaggcagtctgcccgttctcagatctccagctgcgtgctgggagaaccactgctctcttcaaagctgtcagacagggacatttaagtctgcagaggttactgctgtctttttgtttgtctgtgccgtgcccccagaggtggagcctaaagaggcaggcaggcctccttgaggtgtggtgggctccacccagttcgagcttcccggctgctttgtttacctaagcaagcctgggcaatggcgggcgcccctcccccagcctcgctgcctccttgcagtttgatctcagactgctgtgctagcaatcagcgagattccgtgggcgtaggaccctccgagccaggtgtgggatatagtctcgtggtgcgccgttttttaagccggtctgaaaagcgcaatattcgggtgggagtgacccgattttccaggtgcgtccgtcacccctttctttgactcggaaagggaactccctgaccccttgcgcttcccaggtgaggcaatgcctcgccctgcttcggctcgcgcacggtgcgcgcacccactggcctgcgcccactgtctggcactccctagtgagatgaacccggtacctcagatggaaatgcagaaatcacccgtcttctgcgtcgctcatgctggaagctgtagaccggagctgttcctattcggccatcttggctcctcccccctactttttttttttttgatacagagtttcgctctgtcacccaggctggagtgcaatggcgtgatctcagctccctgcaacctccacatcccaggttcaagcgattctcctgcttcggcctcctgagtggctgggattaaaggtgcctgccaccatgcccggctaattgttgtatttttagtagagacggagtttcaccatgttggcaaggctgatctcgaactcctgacctcgggtgatctgcgcacctcggcctctcaaagtgctgggattacaggtgtgaagcaccatgcctggcctaaactacttttttaaatgttaaaaatattttcttgggccaggcatggtggctcacacttataattccagcactttgggaggctgaggtaggtggatcacttgaggccaagagttcgagactggcctgagcaacatggcaaaaccctgtctctactaaaaatacaaaaatcagctgggcatcatggcacacacctgtagtcccagccacttaggaagctgaggcacaagaatcacttgaaacctgggaagtcgaggttgcaatgagccaagattgtgccacttcgctctagcctgggtgacagagcaggactctgtttccaaaactatttctttttgtagttcatggcttaaaacactacaaaactgaaagctgagatgcaaaggtttttattcacatttaatgaggtaaagtgtgatgtaatataagatatgacatgatgtgggtagcaccactggaatcagggcagatatgagtttgaactaactctctgtctctctgtccgtctctgtctctgccatttcttagctgtgtagtattaggccaattacttaccctctctaatcttttcttttatgtaaagtgataataatcatacctctttcataggatagttattaagatagtccaagtgaagtgtcttgcatagtgcctggtatgcagtaggcacttaaaagatgcttgtcttattactgtaaaaatttagagatgtgatttaaggcctaaagttataatagttaaaggtagttataattatggagcttttaaaacctttatttaaagtagttgtgaatctacttctctgctatttgagtaaatttgttatagaaatgattatataattttttgtgattctggggctatgagtttctcttggtatgaagtaagtaagccattataatatgagaataaggcagtactaacagctatcaggatatgtgcattgtcttttaggcaagctcaccacctgtataccttctccaattaatagaatttggagttgtttttactgaaaataatgaaagatgagtctgaaagctgagcatatacatttgtagaattcaaacggatgcctgctatgctgcttatgagtgagataatgtaactgtagctatatcccagtgaaggtaaaatatcactaacaaccacttgaaattgtgttgctccattctccttaaaatatacttctattactgtgtagctgtaggggatgattataggaaaaagtgtccactacccagatgtcacaaatactgaaaacaacaaaagaattctttattaaatcctgtattaatcaagttctcatgattcagatgctttttacatgttcaatagttaccctgctaacacatattacagagtatcagactgtatggtaataatttcactgtacaatacaagctaatttagtaggattctattgatgtattcaaaacttgaatattttacatgaaaatgtacttattccctaaaagaataaattttcttataataccatgtgcatttgttgcacagtcagcagtgactcttaagaaccattaaagaaatttcatggagttcctttataattaggcaacaagaatatgtggtcctagggtgtattagtcagggttctctagaaggacagaactaatagaatatatgtatatatgaaggggagttcattaagccgaattgactcacacagtcacaaggtgaagactcaccataggccatctgcaaactgaggagcagggaagccagtctgagtcccaaaacctcaaaagtagggaagcagacagtgcagcctccagtctgtggccgaaggcctgagagcctctggcaaaccactggtgtaagtccaagagaccaaaagctgaagaacttgaagtcagatgttcttcgagggtaggaagcatccagcatgggagatagatgaaaactggaagactcagcaaggctgctcttttgtcttcttctgcctgctttattctagccattttggcagctgattagatggtaccacccagattaagggtgggtctgcctctcccaggccactgactcaaatcttaatcttctttggcaataccctcacagaaacacccaggaacattactttgcatccttcagtccaatcaagttgacactcagtattaaccatcgcacaggacaatcatatgcttcggtatttataggtttgggtaatcagtgtagtgtttataaatacatagtagtgtaagtcaggggcttttgagtcaggatgtcaagtatctacctgacaaaagtgtcaaagcctctactgctttctagttttgttacgcatcttacttggtttcctcatctgtgaagtgagaattatagtaacagtattactatccataaggtagtggaaggatttaatgaattaatatatttaaatcatttaaagtgtacctggtgcataaaggcccaataaggtttagatggtgtagttgttactgttctacaatgtgacatgtcttaaagcaaactatttttatagaacagtaaaatcagctgggaaaagagaggctttgttttaagaacactagtattccttttgcatttccacatagctatagagtgagaagataaggggataatggcgttttgaaggaaggaggggagtaaatataactttaaagattttaattggatgggtgaaattgtttatatgttttaagtatagtcagtaattggccaggcacagtggttcatacctgtaatcccagcactttgggaggccgaggcgggtggatcacctgaggtcaggagtttgagaccagcctgaccaacatggagaaaccccatgtctactaaaaatacaaaattagctgggcgtggtggcacatgcctgtaatcgcagctactagggaggctgaggcaggagaatcgcttgtacccaggaggcagaggttgcagtgagccgagattgcgccattgcactccagtctgggcaacaaaagtgaaactctgtctcaaagaaaaaaaaaaaagtatagtcagtaattaaataattttttgagactggacaaaagttaaataaaagtaagctagtaattatattcaatgtcatagcagattttaaaccacagcttttcaggttgccagtaaataccacacaaaagcaagaggaggctggttgtgctagcttacacttgtaatcctagcactttgcgaggccaaggcaggaggatcacttgaggccaggagttcaagaccagcctgggcaacatactaagactccattttttaaaaagaaaaaaggaaaaattagcccagcatagtggcgtgagcctgtagtcctaggtactcagggggctgagacatgaggattgcttgagcccaggaggttgaagctacagtgagatgattgtgccactgcactccagcctgggcaacagagcgaggaaaaaaaaaaacaacccaaaaacaaaacgaggaatgtaaaagtgcagtgcattttacaatgttatgattaaagtgaactctatcttaaattttataataactgactttattttacttacttatttagtttttgagataggatctcctctgtcacccaggctggaatgtagtgctcactccaggctctgcctcctggacttaagtgatcatcccacttcagcctcctgagtagctgggactacagatgcgcactaccatgtctggctaatttttgtattgtttaattaatttatttttttgctagagacagggtttcaccatgttgcccaggctggtcttgaattactgggctcaagggatcaacccatcttggcctcccaaagtgctgggattacaggcatgagccaccatgcctggcctgtactaaatgagattaaaaacttgctttgggccagacatggcggctcatgctggtaataccagcactttgggaagtcaaggcgggaggattgcttgagcccaggagttcgagaccagcctgggcaatgtagtaagaccttgggcaatgtagtaagaccgtgtctgtatttaaaaaaaaaagagagagaaaagaaaacttgttttgcttgcatgtaccaattgagagtatagtatgtgcttcaaaggaaaaaggtttaactgttgaacagctttaggagaaataaccaaattgctttgtgggtatttcatgcacaaaactaggaaagagaaatgaatatgggaggattcaagttacaataagactttatgctccatgagaggaagatattacatattacagaatattgatttcagaaggcaaaagatatttactacttatgctccatgagaggaagatattacatattacagaatattgatttcagaaggcaaaagatatttactacttagagtaatttagttaagaaaaaagaaaaaatacagtaaaatgttagataagatccaattagagcctaccaggcactcttgtgaggtttgttactgccttctgtggtttatcagtagcttagcgggaactatagaaaaataattcaggctttatgtcccaaatcataactgtaactccctccattcttctccactttcagtaggtggaggaaagtcttactcagggaaaatttaacaatatggtcatttcataattagaaaactttattaatactggtgttaggtgtttgaccagacacttttaaatttaccgtgttcatggcttccttaattgagtacaatatcagaagcagctgtcttcatattagccaatagcccatagatctttagtaattttgtgcatgatatattatggccatttctctttatattataaaactgtcatagaaatgctttaattaggctgggtgcgatggctggtgcctgtaatcccagccctttgggaggttgaagcaggaggatcgcttgaatccaagagtttgaaaccagcctgggcaaacatagcacaacctagtctcttcccccaccaaaaaatagaaaaattagctgggcatggtggtatgtgtctgtggtcccatctgcggggaaagctgaggtgggaggattgcttgagcccaggaggttgaagctccagtgagccatgactgcactgctgcactccagcctgggcaacagagcaagtccctatctccaaaaaaaaaaaaaaggaaaaaaagaaaaaaaatgcttttttttatttcagtgggtaataagctgttattttgtgtgatgctcatttccttaaataatacattaaattgttattttttgcatttgaaattgaaaaatgggaatttttctcttgaataagaaacagaaatgaattaaacttattaccaatagtaatcatactattctgaatttctctatagagagcattataaatatctcatacttttgcttttatattacgaatttgtattgtagggtgaaaaagatactttttaatcttaaacaggatattttcctttgtgttttgtgaattcccacccttgtttttggcaatgtagatcacttacgctaaagatttaaaaagccatatttcactttaagaacttgagaccagaggttacaaactggtggtgtggacagtatttaaaaattttaaaaaattaattgcgaacatataaaaactgggagattttattaaaatttcagtgttaagcaacttctgaaaactcagagctggccacattgcatgggacccgtattcttttttttcttttttcttttttttttttttttttgtgatggagccttgttctgtcacccaggctggagtacattgacacgatctcagctcactgcaacctccacttcctgggctcaagcgattctcccgcctcagcctcccaagtagctgggattacaggcacttgccaccacgcctagctaatttttgtatttttggtagagacagaatttccccatgttggccaggctggtcttgaactcctgacctcaagtgatccgcctgtctcagcctcccaaagtgctgggattacaggcgtgagccactgtgcccggccccatatttttatatggcaaaattcaacaggagcagaaatagctgtacctgttaggtgggacacccactattcactttgccactctacaccttcccagtaaagaatcaatatccggtacttctgagcgttgtaacctcttcattaatgcatttgtttttttgacgtgtgcctgtttcggtggaattatctagagaataagaaaaagggcctggtgcagtggctcactcctgtaatcccagcacttagggaggccaagcatgtggatcgcttgagcccaacctgagaaacatggtgagactctgtctctacaaaaactaaacaaaaattagccagatgtcatggtgctcacttgttgtaccagctactcaggaggctgaggtgggaggattgcttgagcccagaaggttgaggcatcactgcactctaacctgggtagcagagtgagaccctgtctcaaaaaaaaaaaaaaaaaaaaaaaagccctgatctacttaggcagtcatttattttatacaagcagtatttttcttttatgctttattcaaaataaaggtgttacattttgtgtctgtaacacgaatacagggggtgaagcatgatagcggattgcctgagctcaggagtttaagaccagcctgggcaacacggtgaaacctcgtctctactaaaacacacacacacaaaattagccgggcatggcggcatgcgcctgtaatcccaactactcaggaggctaaggcaggaggattgcttgaacctgggaggcagaggttgcagtgagcgagatcgtgccactgcactccagcctgggcaacagagggagactccatctcaaaacaaaacaaaacaaattcaacgaactgaaataagcttataataatttaaaattcaggcaagtattgcttccataaagcaatcacctcaagaaagcacttactctaaaagtgctactcaaagcatttttggaaaaaaaaaaaaggtatatttcctttgaatagtctcaggatgcctgatatcctttgagagtagatgcgttttaataatagtaatacatgtaatttgacaagaaaatcaaatgggacaaattttattaagtagtgagaaaccagctcaaagtctaacatgtgagactctggatgataccaggttttatccagcatcacagtaaatttgaacctcattagaaacatttgtccaaagtaaatagttctctggaaaagatgatattataaatgtaagtttaggtcaggcgcagtagctcacgcttgttaattccagcactttgggaggctgaggcaggcggatcactttgagcccaggagttggagaccagcctgggcaacatggcaaaacattgtctctaaaaaaaagtacaaaatttagccaggtgtagtggtgtgtgcctgtagttccagctactcaggagactgagcaagagatcacttgagcctgggaagtagaggttgcagtgagccaagatcatgttggccaggcacggtggctcatgcctgtaatcccagcactttgggaggctgagatgggtagatcacctgaggtcaggagttcaagaccagcccggccaacatggtgaaacctcgtctctactaaaaatacaaaaattagccaggctcgttagcatgtgcctgtaatcccagctacttgggaggctgaggcaggagaattgcttgaacttgggaggcggaggttgcagtgagctgggattgcaccactgcattccagcctgggtgacagggcgaaactttgtctcaaaaaaaaaaaaaaagatcatgccaccacactccagcctgggcaacagagtgagagcctgtctttaaaaaaagaaagaaagaaagaaagaaatacaagtttatactcagcagcccttcaaacttacctccctcccaaaataatatgatataatgaattaaccaaaaaacaataataccaaagcatcactagcaaagaaaacttcagagtgatgaaaaccaggtaactgccctaatctcatgccacaaatttctagaaatgtctttcagaaacagtattatttagaccagatggaaagaaaatcatttgcagctattttttttgagcatacactgttgttagaaccacataaagtttagaaacccctactgatacgtcacgggaagaagaaagttagttgggtatataattcagttgtgtcttgaggccacaactacaaagccattaaaaatatatatatatatgattaattttttgtaaaaatttttatataaatatgtatttccctcctctttgataaaagctcttaatatcacagttggcttacttctacctggaagaactccccacctaagttggataaggtttagaagtgaagtcattaggtgagaaaattggcagcagtctcgaaatccttttcccagctatgtagcagttgcttaagcccctagcttcctttccatctttgtcaggtgaaatgagtgaatcaattagagaaactggtattatttaccaggtaaactcaagaaaaatcagttgcactaattgtaggctaaagatagaccacgtttgaaatctcccagttgaaaaattattttaaaaacagacatgaggctgaatgtggtggctcacgcctataatcccagcacttcgggagactaaagtgtaaggattgtttgaagccaggagtttgagaccagcctggggaacatagtgagaccacgtttctgcaaaagaatttaaaaattaggtgggtgatggtatgcccctgtagtcccagccatcctgggccatcctggccaacacaacgaaaccctgttgaaaacaaataagtaaaaacagatgaaatgtaattcaccacattaaaaaaaaaaaaaaagagaaaccttatcactttgatggatacaaaaaaagtatttgataatattcactaatagttcataataggaaaaccttcacaataggatttaaaaggaacttaatctgataaagactctacaaaaattctatagaaaactttaggccgggcacagtggctcacgcctgtaatcccagcactttgggaggccaaggctggcggatcacctgaggtcaggagtttgagaccagcctggccaacatggtgaaacactgtctctactaaaaatagaaaaattagccgggcgtagtggcgcacacctgtaatcccggctacataggaggctgaagcaggaaaattgcttgaacctgggaggcggaggttgcagtgagcctagattatgccactgcactccagcgtgggcgacagagcgagactccatctcaaaaaaaaagttccatgtctctaaaggctgtgacatgataatagcagcaataatacgaattatgatgtagcaggacaagccgcagacaaaacccctcagacaccaaagggctttattcggccgggagcatcagcaaacttaggtctcaaaaaaccaagctctccaagtgagcaattcctgtcccttttaagggcttacaactgtaagggggtccacgtaagagggtcatgatcgattgagcaagcagggggtacgtgactgggggctgtatgcacgggtattcagaatggaacagaacaggacagagattttcatgatgcttttccatacaatgtctggaatctatagataacacaagcagttaagtcagggcttgatttttaactaccaggcccagggctcagagctgggctgtctgcctgtgaatttcatttctgccttttagtttttacttcttttttctttggaggcagaaattgggcataagacaacatgaggggtggtctcctccctttatgatagacaagctgtattaactttttttcttttctttttttttttttttttttttgagacagagtcttgctctctcgtccaggctggagaacagtggcatgatttcagcttactgcaccctccacctcctgagttccattgattctcctgccttagcctcccaagtagctgggactacaggcgtgtgccaccatgcccggctaatttttgtagttttaatagagacaggttttgccctgttttccaagcttgtcctgaactcctggcctcaagtgatgagctcgccttggcctcccaaagtgttgggattacaggcgtgagccaccgagcccaacctgcattaactttttctgtttgtttgtttgtttgtttgtttgtttgtttgttttaaaaagcaaaactgagtgccagtggcttatgtttttaatcccagtgctttgagaggctggggttggaggattgctaaaggccaggagttcaaggctgccatgagctctgaccatgctactgcactccggcgtagctgacagagcgagaccctatctgttaaaacaaacaagcaacaacaacagcaaaacccaaatgtgtgctttaaatagataaattgtatagtaggtgaattatatttaataaagctgtttttaaaaaacacagatttgacccatggagaaattttgccccagaaagggggcataaatatagtattcaagtgaggaagagcattcagtgtgttagaagaaattttaagtctctcgagggaggaataattagctcctttgaaaaaaatttgtggacatgttaaaatcactgcacagattttttaaaaaaaattgtttcaggaggacagttgtgaggccagtgcacttttggctcagtgggaatgaatgggtaagtgagtgggcaagcaggatcatttggttggtgtggcagaagggaggagggctcaggctttttggactcctttgactgtgtttgacagtgtgacctagtcagtgaacataattctgtgaggctcagcgtcctttttgaaaaggaataattgcctttactaaggcaagtaattccagtttgactccactgaataggtcacacagcacctagagtcaatcgtttagaaaatgtaaatgctttttgtaaagctaaatccctttaagcataaatgtcagtaccattcttaaatgtcttcttattggactatcagtgacctataaaatcctgaacaatggactcctgctacctctttactttgctcattgtaatccccggcgttgctggtcttctttcaccaaaagcctttcttaataggctgctgctttttcctttctggaaactgtgttccctagctcttgacaaggttggctccatctcttccttgaggacactgtttaaatgtggcttctaatttatgttttcacaacagtgtacaaggattccctcttcttctcatccgcaccaatacttgttatctttggtcttttttgtaattgccatctgacagagtaagaatgtaagttagtattcctattatggaaaactgtatggaggtttgtcaaaaaactaaaaatagaattactacatgatccagcaataccacttctgggtatttatccaaaagatttgaaatcagtttgttgaagagatgtctgctttcttatgttcattgcagcattattcacaatagccaagttatggaatcaacctaagtgttcaacacatgaatgaataaagaaaatgtacacacacacgcacacacatatacatattcagccttaaagaaggaattatgtcatttgtggcaacttggatggaactggagaatattttattatgctaagtaaaataagccaggtacagaaaaacaaacaccgcgtgttcttacttatgtgtggaatctaaaacaactgaactcatagaagcagagaatagaatggtggttacagagcctggagggttgagaaagtggtgagaccatggttaaagggaacaaaatctcagctgagggatatgttttttttttttttttttaattctgtggtacagtgtggtgaagatagtttttgtacattttaaaattgctgagagaataaatttcaaatattcttaccacaaaaatgttaagtatttaaggtaatggatatgttaactagcttgatttaattattatatattatattcataaattataacattactttgtaccccttacatttatataattataaattgtcaacatacaatttttaaacttttaaaaaataaatgtgtcttctaataaaaggcttcccacccctctatctaaaactcttccatgctgtgcatggtgacacatgcctgtaatcccggtttctcaggaggctggggtgggagaatctgttgaacccatgtgttcaaggctgcattgcactgtgatctcacctgtgaacaggcactacactccagcctgggctacatagcaagaacacatctctaaatatgaataaaataaaactttcctctttgatttcaccgtaatccttagtttagcagatctttgatatgtagcatcgtcccgatttgtgtttttttaattcatgtgtttgtgaggccctctctacactagaagttctgtgagcagaggagctgtatatgtcaagttcactgttatatcctcagtggaataacccagttttaggcacataggaggcactcactgaatagttatttattaattttttttttttgccatatacctacaaccttctaacttttatttttaagattaaaaaaaaagttcttggtttttggggtttttttttttttctcccagcaggagattttttttcttacttttaaaaaattattattatactttaagttctggggtacctgtgcagaacatgcagttttgttacataggtatacacgtgccatggtagtttcctgcacccatcaacccatcacctacattaggtatttctcctaatgctatccctaccctagccccacaccccccaacaggccccagtgtgtgatgttcccctccctgtgtccatgtgttctcattgttcagctcccacttatgaatgagaacatgcggtgtttgattttctgttcttgtgttagtttgctgagaatgatggtttccagcttcatccatgtccctgcaaaggacatgaacccatctttttttatggctgcatagtattccatggtgtatatatgccacattttctttatgcagtctatcattgatggacattggggttggttccaagtctttgctattgtgaatagtgccacaataaacatacgtgtgcatgtgtcttcatagtagaatgatttataaccctttgggtatatacccagtaatgggattgctgggtcaaatggtatttctagttctagatccttgaggaattgccacactgtcttccacaatggttgaactaatgtacactcccaccaacagtgtaaaagcattcctatttctccacatcctctccagcatctgtttcctgactttttaatgatcaccattctaactggcgtgagatggtatctcattgtggttttgatttgcatttctctaatgacagtgatgatgagcattttttcatgtttgttggctgcataaatgtcttcttttgagaagtgtctgtttatatcctttgcccactttttgatggggttgtttgtttttttcttgtaaatttgtttaagttctttgtagattctggatattagccctttgtcagatggatagattgcaaaaattttctcccattctgtaggttgcctgttcactctgatgatagtttcttttgctgtgcagcagctgtttagtttaattagatcccatttgtcaattttggcttttgttgccattgcttttggcgttttagacatgaagtctttgcccatgcctatgtcctgaatggtattgcctgggtttttatctaggatttttatggctttaggtcttacatttaagtctttaatccatcttgagttaatttttgtataaggtgtaagaaaggggtcctgtttcagttttctgcatatggctagccagttttcccaacaccatttattaaatagggaatcctttccccatttctggttattgtcaggtttgtcaaagatcagatggttgtagatgtgtggtgttatttctgaggccactgttctgttccattggtctatatatctgttttggtcccagtaccatgctgttttggtaactgttgccttgtagtatagtttgaagtcaggtagcgtgatgcctccagctttgttctttttgcttaggattgtcttggctatgcgggctctttttttggttccatatgaagtttaaagtagttttttccaattctgtgaaggaagtcaatggtagcttgatggggatagcattgaatccataaattactttgggcagtatggctattttcgtgatattgattcttcctctccatgagcatggaatgtttttccatttgtgtcctctcttatttccttgagcagtggtttgtagttctccttgaagaggtccttcacatcccttataagttgtattcctaggtattttattctcttagtagcagttgtaaatgggagtttactcatgatttggctctcttgctattggtatattggaatgcttgtgatctttgcacattgactttgtatcctgagactttgctgaagttgcttatcagcttaaggagattttgaggcatggtctcactctgtcgcccaggctggagtgcagtggtgtgatgtcagctcactgcaagcaccacctcccaggttcaagcaattcccgtgcctcagccacccaagtagctgggattacatgcatgcaccactgcacctgactaattttataggtgtgagctaccaaaccccgtggctttttttttttttttttttttcactttttttaaaaaagactggctctcactatgttgtccaggctggaatgtagtagctattcacaggcgtggtcatcatgcatgtcagcttcgaattcgtgggctcaagtgagcctctcaccacagcctcctaagtatctgggaatatatgtgtgtgacaccacacctggcttcacaaaatatttgttgatttaactaggaacactttgaataaatgtagtggtttgtatttttcctttttgacacctggaaattatccaaactccttctgtaattgctattattctttaagattcatttatgtagaagtagtattttaaaatgcgtgtgtaggctgggcatggtggctcatgcctgtaatcccagcactttgggaggctgaggcaggcggatcacctgaggacaggagttcgcgactaacctggccaacacagtgaaaccctgtctgtactaaaaataccaaaattagctgggcatggtggtgcatgcctgtaatcccagctacttgggaggctgaggcaggagaatcccgggaggtggaagttgcagtgagctgagatcatgccactacactccagcctgggtgacagagcgagactgtcttaaaaaaaataataaataaaataaaatgcatatgtatatatgtttttcttttttcctttttttttttttttgagatggagtctagctctcttgccaggctggagtgcagtggtgcgatctctgctcactgcaacttccgcctccagggctcaagcgattctcctgcctcggcttcccgagtagctgggattacaggcatgcgccaccacacccagctaatttttgtatttttagtagagatggggtttcaccatattggccaggatggtctcgatctcctgaccttgtgatctgcctgcctcggcctcccaaagtgctgggattacaggcgtgagccgctgtgcccggcctcttttccttttttttgagacagagtgtttctctgtcacccaggtagtagcacaatcatagctcactgcaacctcgaactcctaggctcaagggatcctttcacctcagcctcccaagtagctgggactataggtacacaccaccatgcccagctaatttttttttttttttatagagacacagtctcaccacatcacccaggttggtcttgaactcctgggctcaagcagtccttctgtcttggccttccaaagtgctgggattataggtatgagccaccgtgcccaggctaaacttttttttttttaaacagttatttaaatcttcttttcttgcagtacaagatacagtacatttcacatatgtcccttttcctgttggaaaaggtgaatcaagtggagggaagtaaattgatattgaggctgagaataaaattgcaggtttctagccttgattttctacctctcacctactttgtgcctatgtaaataggctgtttcttcatggccaggaaaaaatgaaatagctgactattgacaattccagaaagcacccagataagaatacttagagttggatttaaaacaaaacctacccaccccttttttggggagagacagggtctctctgtctcccaggctggagggtagtggtgtgatcacagctcactacagtcttgacctcctgggctcaagtgatcttcctgcttcagccatccaagtagctgagactacaggcatgtgccaccctgctaatttaaaaaaaaaaagtctgtttgtagagatggggtctcagtatgttgaccaagctggtattgaattcttcggctcaagcgatcatcttgtcttgacctcccaaagttctaggattataggcatgagccaccacaccaggccaaaatcagtttattggccataagttttcatcttttgatgttctctcacgccatttaaaatgggtgaaaatttgggttatagttttctaatgactgttgctttttcacaatgatcacaatgataacgcatggcagataattagggcaggatatacctcaaatgtctgtttcccaaaacaagcaattacaatgcccttcttatgtactccttttagcacctcaccatagcactaatcacagtgcattgtagttgcttgtttacttgtgtagtagctctagtagctcggtgaaggttgtcacattcaccattttatttgcagggtacttgtgacaggtactatagtcatggtacttttgattatctttttctttctactcagaatggtggcaagaattatgatatctggagtttggatttttttagccttgtgagatctgttcattggttgaaaaccaagattgagaactcatttatttgtgtgtgtgtgtgtgtgtgtgtgtgtgtgtgtgtgtgtgtgttttattcactaagtatttgagaacttaccatgctaggccctgcaaataaaatggtgaatgtgacaacagtttttaccttcacagagctaatacgtgagtagacaagcaattacagtgcactgtgattactgctatggtgagttactaaaaggactacataagaggggcactgtaattgcttgttttgggaaatagacatttaaggtgaaaactaaatatgagcataagttaacataatgaagagcagagataaaggaggacccaggtccagggccctttggaagccttgaagtaagtttgatattcattaacataaaatataagggaacagttaaacagaaattaagcggaagaggtaagcaagtgccagatctggaatgacctcaagccatgtaaggattttttttttttttgagacagagtctcactctgtcgcccaggctggagtgcagtggcgtgatcttggctcactgcaagctccgcctcccgggttcacgccattttcctgcctcagcttcccgagtagctgggactacagatgcctgtcaccacgaccggctaatttttttgtatttttagtagagatggggtttcaccgtgttagccaggatggtctcgatctcctgacctcgtgatccacccgcctcggcctcccaaagtgctgggattatagatgtgagccaccgcgcctggccaggattttgttttatcctaaaggaagtcggaagactggaagaggctgctagagagttgagggtcctcagaggttgatgaaatcatagaatgagtacaatgagagtaaatgagtgtgagagagctggaaggcaaataaaatcaaagtgccactgtattttgctttggctccctttaataatgaacagctgttctaaaaatgtgtatataactagtggggctgggcatggtagctcattcctgtaatcccaacactgtgggaggccaaggctggaggatctcttgaacccaggagtttgagaccaacctgggcaatatagtgagacctcgtctctacaaaaaaatataataaacaaaaatgtacaacaggtagaacagacgaatttatgaaattgagattagttgttttcactgaaaaaagtaagggatctgaaggtgtaaacccaaagacaaattttatttataatttactttttagttgtaggatccagtcatttccagagatcaacgttataaggaaataagataaaaataagtattatagattaagtggacagtgttttctgtgcctttttggcaagtagaagacgaacatttttttccctgaccacataagcgtaagttgctgacaggcagggcgcggtggttcacgcctgtaatcccagcactttgggaggctgaggcgggtggatcatgaagtcaggaggttgagaccatcctggctaacatggtgaaaccccgtctctactaaaaatacaaaaaattagccaggcgtggtggtgggcacctgtagtcccagctactcaggaggctgaggcaggagaatggcgtgaacccgggagacggagcttgcagtgagccgagattgcaccactgcactccagcctgggtgacagagcgagactccgtctcaaacaaaaacaaaatcaaaaacaagtaagttgctgacaagatgtttcataagtccccgtactttagtgtactactaaaatgtagtctgaagattagatatactgtggtgtgtatgtatatatatatgtacatgaaatacagtagtgtatactaaatagagacagggttttgccacgttgtccaggctggtcttgaactcctggcctcaagtgatccacctgcctcagcctcccaaagtgctgggactacaggcatgagccaccatgcctggccaatattttgtagttttgagcatagatttttgtacaggttttgtaatatagcttcctaagtttcttgttgctttttttagatagaattattactttaattaacaggctttatttttagattttttgggtacagttttaggtttacagagaaatggagtggagagtacagagttcccctatatcccccaacactcctccacccccgttttcccctattattaatgtcttgcattactatgctacatttgtagtagttaacgaaccaatattgacacgttattaactaaagtcggtagtttacattagatagaatgtattacactatttgtattatacattctatggatttggacaaatgtataatgacatgcatctaccattatggtatcatacagaatagttttcctgctctaaaaatcccctgggctccacctgttcacccgcccccctccccacccacaatatctggcaaccattgatctttttaccatctccatagttaggatttttctagaatgtcatgaatttggaatgtagtatttagctttttcaaatggatttctttcacttagcaatatgcattttaggttcttctatgtctttttgtagctttcaataattcatttccttttattgctgaatgatattccattgcatggctataccacaaatttgtttattcattcacctattgaaggaaatcttagtgttttcattttttgacaactacaaatgaagctgctgtaaacgtttaggtggtggtttttgtgtggacttaagttttcatttcatttgggtcaataccaagaaatgtgctgggtcataggtaagagtatgtttagttacataagaaactgccaaactttcttccaaaatagccgtaccattttgcattctcaccagcagtgaatgagagttcctattgctccatatcttccttagcatttgatgttgtcagtgttttggattttcactattctaataagtgtatagtggtatcattgttttaatttgcaattcccttctgacatatggtattgagtatattttcatatatgtatttgccatccgtatatcttctttgaagagacgtctgattcaaatattttgctcatattttaactgggttgttttctgattgttgagttttaagagtgttgtatattttagataacaggcctctaacaagttaagtgttttgtaaatattttctcctaatcagtggcttatcttttcattctcttagcagtgccttccccagagcagaagtttttagttttagtgaagttaaacttaacaatttcttctttcattgatcatgcttttgttggtatatctaagaagtcattgtcaaacccgaagtcatttagattttttcctatggcatatagtaggagttttatcattttgtgttttacatttaggttgtgatccattttgattttatttttgcgaaagatgtaaggtctgtatctagattatttttctttatttgcaaatatatgtctaattgttctagcaccatttgttaaaaagactatcctttctccattgaattgcctttgctcctttgtcaaagattggtatgaatatatttgtgtgaatctatttctgggctttccattctgttccattgatttatttgtgtttttttttttttgcaatatcacactgtcttgagtactgtagctttatagtaagttttttttttgtttttgtttttgtttttttttttttggagacagggtcatactggcactatcatagcgcactgcaaccttgaactcctgggctcaaacaatcctcccagttctgcctcctgagtagctggttccataggtgtataccaccttgcccggccaatttttatttttattttgtagagacaggatctcgttttgttgcccaggctgttcttgaactcctgggctcaagtgattctccccactgtggcctcccaacacactgggattacagatgtgagtcactgcacctggccttttgttttgttttgttttagcttaaatgcatttcaagccttgtattggtactcaaattgtcctacagtgtcttttaatttgtcctatagttattgatagttttataaacacacattcatgtgtgcactggagcacacagatatcatttttgcttaatgtttgctaaatacttattctgggtatgatactgctcttgaaatttaccctgtgttttaaacatcaggttagggttttatctcattctttgaaaagcttacaattggaatgacagatgttggtacaaaaaccagtggcaacccaacagaaggggaaatttgttggggtgtttcttagaagaatttttatcgttgaccaacataatttaaaaaaaaaagacttataaggagaaagatttttggttttgccctattatttctgttttggacagtaggatgggaagtgatgcctgaagccgaaacttgtgaccaagaaacagcaagcatgaggaccaaaagcaatgtgtggtggatgaagaagtagtagatcagaaagagcctggtttgcttttgagtttctcatacacttaccatatgatccagcagtcctatacctataaacaatttcatcataagttgtgtaagaagagagatttagaagcctggcaatctctcttttgattattaacaaaaacccagggtgttttgactttgaaatttaaatatttatgtacctcacttttgataaagccaatatatgagaatctgaaatatacaaacagtaaattagtgaaactttttttgatgcttttataatatgacttaattttcttttagacttcatgtaacctcccatatactgttttacatgaatttaagtagagttcaaatgataagccaaagagtttgtaattgagcagtttataattgagcagttgtaattgagagtgataaagaaacaggattttaaaaaacttagtaactttaatttcttaagtgagagatgccacataaagtagcattgaatattattcatctttcgttttctttccttttttttttttttttttttttgaggtggagtttcgctctcgttgcccaggctggagttcaatggcgtgatctcagcccactgccccctccgcctcccaggttcaagcgattctcctgcctcagccacccaagtagctgggattacaggcgcctaccaccataattttttttgtatttttagtagagacagggtatcaccatgttggccaggctggttttgaactcctgacctcaggtgatctgcccacctcggcctcccaaagtactgggattataggcatgagccactgctcctggcctcatctttcataattatagattgaacaatgcttatgtcccatgcatagattagaaaattgacacagcacctttagtgtcagtttttgtcatggttgtgggaagtaaagtgattgttctgttctacaagtaggtgttatgaacattttcccccagctgagtgagatttttggctttttttttttttttttggacagggccttgctctcacccatactggagtgcagtggcacgatcatggctcactgcgtccttgaacctcccatgctcaagcaattctccaacttcagcctccccaagtcactgggaccacaggtgtgcgccaccatgcccagctattttttttttttttttcttgagacggggttttgctcttgtcgcccaggctggagtgcaatggcatgatctcggctcactgcaacctgtctcctgggttcaagcaattctcctgcctcagcctcccaagtagctgggattacaggcatgcacaaccacgcctggctaatttttttgtttttagtagagatggggtttcgtcatattggccaggctggtcttgaactcctgacctcaggtgatccacccgccttggcctcccaaagtgccaggattataggcatgagccactgtgcccggccctaatttttaaattttttgtagacatggggtctccgtatgttgcccaggctcatttcaaacttctaggctcaagtagtccttctaccttggcctcccaaagtgctgggattacgtggatgagccaccatgcccagccaatttttggctttctatagggttttttttttttaatttaatttttaatatttttaaatttaatttttaattttttttttgtttttttttttagagacagggtctttctgtgttgcccaggctagagttcagtggctatttactggcatgataatagcacattccagccttgaactcatgggcttgagcagtactcccatctcagcctcccaagtaactggagactataggcacataccattgcacctggcttctatgggtttttaacctgacaaatactgtgtgttcttctaatacatacatgtaagtaaacatggataatgagggctatgtgtgattattccatctaatgttatactagtctaagtgcaatggaagaaattagtgcaaagtattataaaaataacatccatctgttggaaaaaacagtgagcaaaaatgaaaaatatgaagagaaataggcaatgtaatatagtttccaaatctttataaatgaggctattgtagtgataatttttgaaaatgtgtgagttcattgaatacttataaattgactgaattgggccaagacacattctgcctctgtcctcatattaacttataatggaaggaagtatagttgacagtctcacgtatagacatactcccaacaattatgatatttttttctctttctttctaatatcatttgagggatttaggcaaaagacaaggataaccgggatagtggatatacttgaaaataggagaaacaatgaggaaatatgaattcttaatgttgttcatgtaggaagttcagtagttgctgacctcctttgatcgctttgatttttttttcctttacagaatatacattataaatgtaaatctattgtaaagcaaagaaaacaaaaatgaaaagcagtttatttaaactataataaagcaatcagaggccaggcatggtggctcacgcctgtaatcccagcactttgggaggctgaggtggttggatcacctgaagtcaggagttcgagaccagcctggccaacatggtgaaaccccgtctctactaaaaatacaaaaaattagctgggtgtggtagcaggcacctgtaattccagctacttgggaggctgaggcaggagaatcgcgtgaacctgggaggcagaggttgcagctagccgagatctcgccattgcactccagcctaggcaacgagcgaaattccatctcaaaaataaataaataaataaataaagcaaacagattgtattattggattatgtgcccacttgtacagtcagctgacagctttttacctgttactttagtagggaattacaggtcctcaggaagtttagagtataggtgtctttgctttgttgtataattggtgataataaccaaacatttgacatttgttctaattctcttaagttttctttctttctttctttttttttttgagacggagtctcactctgtcactcaggtgggagtgcagtagcacgagctcggctcactgccacctccacctcctaggttcaagctattctcctgcctcagcctcccgagtagctgggattacaggtgcctgccaccacgtccagctaatttttatatttttagtagagacagggttttgccatgttggccaggtggtctcaaactcttgacctcaggtgatctgcctgccttggcctcccaaagtgctgggattacaggcgtgagccaccacacctggccttcttttcacttaagttttaaggaaaacatttatgaaagtgaaatataagtgtgtgtttagtatgtgattggtgatagcagtatttttttttttgttaagaatactcacatggataatcaaatatagcatcaaaattatctcattgcaaacatttgtgttgggctcagtcctgaatttggacactgcagaattctggtagagatgaatgttacgcttaagattttttttttttttttgctttattttcactttggggttctgcaaaggatctctttttggcactctgtcattgcatactcagcatacagcaaaaaccaccaaaagtttagcttttcagaactttaggactacttaataccaatagagttttggaagttccttcatagaggttgtctgtgttgattggtaactgaagattacataattcttgctagtgcttggtaaatgcttggataggggaatgggggagtgaatagtctaatttcttataagttttggcgaaattaaaaggaagagcttaaaattaaatcatcctcagtttctttaacttgattttagcactgctctgtatttctgttagccagtgatgaaaaacaattgtctttctttttggtcatagatacattactagaagaaagcattctatattaaaggcttgtgtgtttctgtagcttctatggtttgcagcctactgagcttatgatactatgtgaataactaatccagatggttaaactattggaggatagaaaaccaaaacccatttcagaagctatgcattttgctcacctttggataggattcattctaattggtagtgactttctgaatttgtttcaaaatttaatttttaactacatgttttcttgatttttacctaggttacaagatgttcacctaagattgagacctagtgactacatttcctacgggaacaaataaatggtttttcatctcccggagatacattacaaacaaatatggtgctaaaagaactccttacctttctctgactacaatttatttggacatacttttgtattgaagagaggtatacatactgaagctacttgctgtactataggagactctgtcctgtaggatcatggaccatcctagtagggaaaaggatgaaagacaacggacaactaaacccatggcacaaaggagtgcacactgctctcgaccatctggctcctcatcgtcctctggggttcttatggtgggacccaacttcagggttggcaagaagataggatgtgggaacttcggagagctcagattaggtaagcacttggttatgtcagtgacttctactaacaacaatacctatgataagctttggtgtgtttcaagacaagccgtttatagttttacaagaaatttttcttaaggagaacctgttgttaagaaataatttgtgaaggggcactatagtcattatcaattatttgttatccaaggctcatctctctttatgtgtgtgcgatgggcttttaagttttctaccagttctgagattttctgatgaacatagagttgcatacagatatcagtaaaatgcagactctgatttaggatgtctgaggtggagccccaaattctgcatatttttacaaattccaggtgatgcagatgctgttggtcttttaagaaggacataaggccttggtttaattcagactctgcccctgaaaagaaaagagtaaatccttactcagtaatacccaggcttagtctgcaaggatatacagtacatcctgtttggagaaattttccaaaagataatttgtttgcgtttcttcctggagtttccagcattagaattaagttagaactccaaggagaagttaggcaattttatttcccaactaaggcaatggattttctatttcaattatgaatttatgggtgagatggaaaataatgacaaaattaatctgtctaaaaatgtgagattgggaagaaggtacattgggtatttatatatatatataaaatttttttttttttgagatggagtcttactctgtcgcccaggctggagtgcagtggcgcgatctcggctcactgcaagctctgcctcccgggttcatgccattctcctgcctcaacctcccaagtagctgggactacaggcatccgccaccacgcccggctaattttgtttttgtatttttagtagagacagggtttcaccatgttagccaggatggtcttgatcctctgacttcgtgatccgcccgcctcggcctcccaaagtgctgggattacaggcgtgagccaccgcgcccggccatttatatactttttaatggctctcccttgatgagtgggatagagaaaataaaaggccgtataaatatatgaagttggaaattagcctggagaatgtggaaaggtcatcttttaggctaaagtgttttcttttccttcatagctcttgagactgtggattaatgtgaagactcattgtaagaaactttggccctttggggggagtggtgggagggtgggaacataatgtaattatgtttgttacctctgctacttctttttctttttgagatggagtgttgctctgtcacccaggctggagtgcagtggtgcgatctcagctcactgcaacctcctcttcccaggttcaagtgattcttgtgcctcatcctccagagtagctgggacttacaggcatgtgccaccatgcccagcttattttttttttttttgtatttttgtggagacgggctcttgccatattggccaggctggtcttgacctcctggcctcaagtgatccacccgcctcggcctcccaaagtgctgggattacaggctgagccactacgcctgaccacctctgctacttgtgatggtcctgcatagagaacatggacaaaatcttatctctgatcccccatagagagccttggagaaacatcactatactagccagagaccatttgaatttaagaatgatgagaatggatttatttttactgttagaaggctgacaacctggaaattcaggacttaattaggataatgaaaggatctttatatttagaattgtgttcgggttaccaaagccagcagatgctacttacaatacgagtaagatgtgtaattactgctttactttctagcaatcacagagttgctttaacgaatagttctgtgaatatttctttatgtcataaattgactgtaacatcacagtactacttggatggattaaataattatgacataaacatccataaaatgattgctaagaggcagtttctaaagcatctaaatctttgaattctcaaaacatcagacaattgtttcatttctgtgaaagtgaagaaaaaccttggtgaattaaaagtggaaatctgtttaatcactgaagtctagatttgtattataagtttacgtgggaagggaaaaattcattcagttaaaagcatacatttatagcccatatatattttcagagtagtattgtgttttgtttcctctttgaatctgagataattttgatgtttctcatttggacttgcctgtagtcagaagaacttgtctttcttttcatgtgcttttactcttctctgcttatcaagttttcattagccctgggaccatactgttatggccttgtatctagaaaagatactttcagaattatctggcatcttcctgacaatagagtgggctgcataccccattccgtcattttcttgttctaatattagcgaggagaagattgtaaactacaaaattccaaagtcaaggcaggtgcagtcagcctacatcatggctaccacctacaaagctctgcttctctaaactaatttcctttcctagacacacagtctgtcaaacagccaagtgcatttcttcttattctttttttttttttgagagacagggtcttgctctgttacccgccctggagtgcagtggcatgatcatagctcacgcagcctccaactcccaggctcaagcgatcctcctacttcagcctccttaatagctagtgcataagaacacgcccagctaatttttttatttttaaatgttttgtagagatgatgttttgcaggctggtcttgaactcctggcctcaagcgattctcctgccttggccttccaaagtgttgggattacagatgtgagccgccacacctgaccaaccgtgtgcatttctgcttcagagcctttacacttgcaattccttctgcttgcagaattatttccctaaaattttgcgtagtgggttgtttctcatcctttaggcctcagcttatgtcttaccttctcagagaaacattctatcacttgttcctcattctcatttaaaatagcacgtttcttctctagcacatcctgtctcgtcaaactgctttattttattcattgcattcatcactatctgaaatgaccatatgtatgtttccctattaattgcctctccttacttgaatataagccctttaaagggcagggattctttctgtattgtttactgttatttatgagatggaaggataaaaagctgatgaataggaagaggggggaaaataaagcatactttctttgggctccaggtttatgtgggggtggtggtagatagtagacctatcggttccaaacagcaaaaaaaaaaaaaaaaaaaaaaaagtaacgatagtgcattttggttctctgcaaatgtttccaccccattatacagttttcttttttttttttcttttagatggagttttgctctttttgcccaggctagagtgcagtggcacaatctcggctcactgcaacctctgcctcccgggttcaagtgattctcctgtctcagcctcccaagtagctgggattacaggcgtgtgcctccatgcccggctaattttttatttttagttgaggcagggtttcaccatgttggccaggctggtctcgaactcctgacctcaggtgatctgcccacgtcagcctcccaaagtgctaggattacaggcgtgagccactgcacccagccttcatcatacatttaacaactatttcttgaatatttactgatactagactctgggaaggatagaaataagaagatatagtttttgtctctacaaataccacagtctagtggtagacagagaaaaacaaattgcaatacaaagtgataatatagcagattgggggctgggtgtagtggcttatgcctgtaatcccagcactttgggaggccaaggcaggcagatgacttgagcttaggatttcaataccaacatgagcaacgtggcaaaacctcgtctctacaaaaaatacaaaaattagctgggtgtggtggtatgcacctgtagtcctagctacttgggaggctgagatgggaggatggcttgagcctgggagcctgatgctaccatgagccaagatcacatcactgcactccagcctgggcgacagagtgagaccgtgtctcaaacaaacaaaaaaccagattgtatggaaactacattggcagagaaggttaataaaggcttcaaagaggaggtatgatttgatgataggacaggatttctgctggtagacataaggaagaagagcttgtgcaggatacacaatcactagatactgtgcaagtgcccagcatatcacagcagcatttagttatacatgactgggtcataggatgtgaagtgaaagaaaagtaatagaatgaagcttttaggtaagttgggacgaaattgtgaagtgtttgcatatattaaagcatttggactttatcctgtaggcaatggggtcgaatcatcaggagttttacaacagagtgacataatctagtttatattccagaaagagaattcgggttgtattgtaagattagatcaaataggaaagaagttgacatcttgtagattttgctctaattgtaatacttatcatgttgtactttattcttccatttctctctcccaagataggtgtaagggtattactttgctttttagtcctcatattctaattcctttcactgtgtgtggtatgtaatgggtactcaagaaaggctgaattgtccaggtcagaagtagcagggcctttggtcttagctctgaaaatggaagtgagatggagagaggacagggtaaattagaaattttagacatagactttaggcaggatttagtcactaattatttgatgggaagaagtcaaagatgactaaatgtgccagcttgaagagaccttataaatgaggaagatgtaaacccatttatgccggaagctgcaaatttttttgtgaaaaatcagaccttggtgatgacctcgagcagtgtatataaataactcccaccagcctagcgttccaataatggaacactaggcataaatgagttaattgagatagtaaatataggactagggagagtggttgggaaggcaggtaagatagagtttgtgaatatttgaggactgggtgacacatatgcagaaatgcatatctgagacttagaaagttaggcttgagatagggattaagaaatcacaccaaactagagatggggtttcaccatgttagccaggatggtcttgatctcctgaccttgtgatctacccacctcggcctcccaaagtgctgggattataggcatgagccaccgcgcctggccaccccccgaccctctttttttttttttttttttttttgagacgaagtttcactcttgttgtccaggctggagtgcaatggcacgatcttggctcactgcaacctccgcctcctgagttcaagcgattctcctgcctcagtctcccaagtagctgggattacaggcacctgccacaacgcccagctaattttttgtattttttgtagagacggggtttcaccatgttggccaggctggtcttgaactcctgacctcaggtgatctgcctgccttggcctcccaaagtgctgggattacaggtatgagccaccactcctggcccttccctatctttttaaaatgagccatgtgtattttgtaatcagcaaaaagtagtaatcaaagcaaaacaatttcattaaagcaaatttttttaaaaagaaaatacacttattgcttaaaatttttttttaattctactttagaggtgtctgtggagataaccagtaatgatggtttaattttctacagctcaaaaatgtgtattaggacatattttagaaatgcaatcaaattgtgctctaagcttcctcttatggctgggcgtggtgcctcatgcctgtaatcccagccctttgagaggccgaggtgggcggatcacctgagatcaggagtttgagaccagcctggccaacatggtgaaaccccatctctactaaaaatacaaagaattagccgggcttggtgacggacgcctgtaatcccagctactcggaaggctgagacaggagaaccagttgaacctgggagatggaggttgcagtgagctgagactgcaccactgcactccagcctgggagacagagtgagactccgtctcaaaaaaagaagcctctttttattgcttaatagagcatgaacatcttgtttcaacttaaatatatctcatcaattttaaatatttctatagtattcaatttagccattatcaatatacacaaaaattattttgtattttaatactataattaatacagtactcctgcagtccccaacttttttggcaccagggacccatttcatggaagacaatttttccatgtaccaggggtggaggatggtttcaggatgaaactgttccaccctagatcatcaagtattagatgtaggctagatccctcacatgcacagtaatagggtttgcactcctgtgagaatctaatgctgccactgatctttcaggtggcactcaggtggtaatgcttgcttacccactgctcacctcctgccatgcagcctggttcctaacagggccacggactggcactggtctactcgatctccttgtatttaaagttggtttaatttcttagactacatcctggaagcgtactttttgtgtcaaaggatatgtacgtttgcaattttgttacacattgtcagtttgccctccaaaaagatgtttcactttgtgtgtatgtgtgtccttgtgcttatttcctccagtgcttcagaaatcttaaacaatatcaagaatcttttcatctatgacagtctgataggggaaaatggtattacttaaatgtgtatgtgttcataggtgaagttaaacatacttacacatatttgcttatttttttaaagagtatttctatgtggcctttgctcattttcaatggaaagattatttctgtggagtcttttgtgtactgcctcaatgaaaggagaattatgaagatttaagacagaagggaaaattgatggatagtgattgtgtaggtaggaggacatgatgggatgaaaacagattttatagattgatactaactgaaaatcatggggaatcttgtgagaactttctcatttttaaagttttgagccttctgctgaatcaggcctggaaagaatcatgtaaacattaaaataaaattattttcctctagagttaagaaaatatacatcctcaatgtacaaataattgctgatgtttttcttagttgcaagaataagtagatagatgatatttatttatttatttatttatgagatggagtctcgctctatcaccaggctggagtgcagtggcgcgatattggctcactgcaacctctgcctcccaggttcaagcagttctcctgcctcagcctcctgagtagctgggattacaggtgcccgccaccatgcccggctaattattttttgtatttttttaatagagacaggtttcaccaagttggccaggatggtctctatctcctaagctagtgatccagccacctcggcctcccaaagtgctaggattacaggcatgggccactgcacctggctggtgatatttctttcacatccacataggggtgcacgtatgtttatgggagacctgttagactagagagacaggcgtatgattttaataatattcatattatccttttgaagtaggatagagtgagaggatgtttttacttgcatacaacaaaatggaggcacaacaaattaacctttttgatcttttccatctttggtgtctgatgaaatatgcaaaaatgcattaacacaggatacttctgacaaaggtaaataaattggctaagggtagcagcttgttctgtgacactcctgcatggcttctaaagtaagacacttatttctgtgattgatgtaggatttatatgacaggctctgcatattgttctttccttgtctgaattactgaactgtcacttgtgaacttaaattggaactttttttttttttttttgtgacggagtctcgctctgtcgcccaggctggagtgcagtggctcgatcttggctgactgcaagctccgcctcccaggttcacaccattctcctgcctaagcctcccgactagctgggactacaggcgcctgccaccacgcctgactaatttttttttttaatatgtgtatttttagtagagacgaggtttcaccatgttagccaggatggcctcgatctcctgaccttgtgatccacctgcctcggcctcccaaagtgctgggattacaggcgtgagccactgcgccctgcttttattggaacttttaacttctgctactagcttttctttttttggcagttgtaattattaacaatttacagatgaatactatctaaagcagttcatttcatattatatcccacagtcttagatccattattttccactccaagtcaatgagaaaagaaaagtgagcaggcagaactctccatgttatctgttttatacattttatacatttgagttttcaataagattttgtttgaaaggtatgattctgctgctttaaacatttttgaaaatcatctgagagaatgcaggcttaagatgaaacataattttattttattttatttttgagatggagtttcactcttgttgcccaggctggagtgcaatggcatgatcttagctcaccgcaacctccacctcctggattcaagcaattctcctgcctcaggcttctgagtagctgggattacaggtgcccaccaccacacccagctaattttttgtatttttagtaaagatggggtttcaccatgttggccaggctggtctcaaactcctgacttcaagtgatctgcccgcttcagcctcccaaagtgctgggattacaggcgtgagccactgcacccagaccaaaatgtaacataatttaaaggtatttcttctctagttcaaaatgaagccattttaaaatcaaatttttgcttttaagttaatagtttcttagaaaatcatggtattttaaacaaatgaaagtgtatcagccaaacacctaattaaccagaaacattgatatatatttgtaaccttgttaaagttttcttataaatttacaaatttttaggttctgtggatggaacaaactaaaacaagttttagaagtcatgtcattcttctgcttaagtgattaaaaataggagtcttggctgggcatggtggctcacgcctgtaatctcagcactttgggaggccaaagcagacagatcatctgaggtcaggagttggagaccagcctggccaacgtggtgaaaccccgtctctactgaaaatacaaaaattagccaggcatggttgtgggcgcctgtaatcccagctactcgggaggctgaggtgagctgagatcgtgccattgcactctagtctgggtgacaagaacgagactctgtctcaaaaaaaataaattaattgaattaaattaaattaaattataactttagataaaatgcattctaatttttttgttgttatgtggatatattccctaatggtgaagtctgggtttttttgtgtaactatcacctgaataatatgcattgtatccattaaataatttctcatttctcacctctttcccacccttttaagtcttcagtgtctattattccacactctgtgtccatgtgtacacattatttagctcccacttataagtgaaagcatgcattttttgattttctgtttctgagttgtttcacttaagttaatggcctgcagttccatccatgttgctgcaaaaaacgtgaaattttattatttttttaagggcggaatagtagttcattgcctgtctgcctgtgtgtgtgtgtgtgtgtaaaatgtgtgtgtgtatgtgtatgtgtatatatatatataaaatcatccatgagggacacttgtttccgtatttttggcgataaacataacatatgcaggtgtctttttgatgtaatgatttcttttcctttgggtaggtacccattagtgagattgcaggatcaaatggtggttttagttttttgggaaacttccatactgtttttcataaagggtgcactcatttacattcccgccaacagtgtataagtgttctctcttctctgcacccatgccaacatcttttattttttgactttttaataatagccattcttaggagtgtaaaaggcttattggaaaaaccaacaaaacaaaaaataataataatagccattctgactggtataaaattatatcttattgtggttttaatttgcatctctctgctgattagttcttttgagcgttttttcatatgcttcttggtcatttgtatgtcattcaaatgtcattcaaatgaagtcatttgtatgtcttcatttgaaaaatgttcatgtcctttgctcacttttagatgaggttatacggttttttgttattgtttgtttaagttccttgtaaattcttacaattagtattgtaaatactataatatccttgtaattggatattagtttcctgttagatgcagtttgcaaatattttctcccattcagcaggttgtctgttcactctcttatttcttttgctgtgcagatgctttttagtttaattaagtcccatttgtctattttgtttttgttgtgcattttaattttcttggaagaatatcaaatgtatatgagattcttgtttgtagtagtatcgtagtttaaatttcttttggaattacaccctagtttaacttaagcacaatttgttaaggttaagcagttttaacagatcttggagaagaattatttctgtcaatagcataatccatcaaaataaagtagaaatgaagagttctaaccacattaggtgacacacagtctgcattgcattaatatggtaattttagaagtgtcacagatacaatacttgcaagattatgcattgacatcttgaatggttaaccagaagaatgtaatggtaaaatttccaggcttgccaaacaattccggaattttttttttttttttttgatacagagtctcacttgttcgcccaggctggagtgcagtgttgcaatctcggctcgctgcagccttcatctcctgggttcaagtgattctcgtgccttgcctcagcctctggagtggctggggttacaggcgtgcaccaccacggccggctaatttttgtatttttagtggagatggggtttcgccatgttggtcaggctggtctcaaactcctgagatcaggtgatctgcccaccttggcttcccaaagtcctgggattacaggcatgagccaccatgtctggccacaatttttgaggaggactatgaaagtaggatggttatgggcaacagaagtttatagaaagatgtgtttatgagggtgattcagaagcagtatttacatgatgtcatcatgcatcctaaggaaaaaactgtctgaacttatggcctacttttccagaaggcggcaaagcttttgtcaaagaaagtggagcttactgccagctgttgtgggctttcaaagagcaggtgatgctggattgattcaattttttttttctatgttggggttactaggacaagaggaaatatatatatatacacatgcacacaaacacacacacacatacacacatatatatatataactttataaagtatcatgtaatattttttataatttatctttaattccaataactaggttacatagattctaaagttctgaatcctataggcaagtggttcaattattttatccatgtcgtctagatacctccttatttctaaatattatttcttaattttttcaatattagatgttgttattgattgtctcacagatgccatccctaatgacgtacataccttgcccatattctcccaatatacttatgtcatattttttggttcaataatttttttacatttacagctttatggctgtggaagtattgtttacaaccaatctatgagagcactgttactgtatttcctttttagtatgactccatcattccttccctcagaattaaaaattgctgatacttgatttttaaaaaaaattcttagttatcaatatacctttcattaattttttttcctcaagtccaacaattaaaaaatttgtcatgatattaggtaattctgtgtttagattccttttctgctggatggcttagttttgctaagtcatttaccatttgtttattcaattctcatcttccaaaatgttgacatctctagtctactgtttcctcacctgttctctttgtcctttcttgtttcctttgtcctttcagtggggttttggaaataaatagagctaaatgtctcaatttttttctgccatgttaaactagatgtctatgttatacatttttatttcagcagggcatttatttgacatacttttgtgtattctggtaacatatagaaatgtgcggtgactgaaaagataattaagtagatttgtcattcctttaaccatcttcataaaagagaatgagttaatggatcattgccctcattgatgctaaacagtagaattctgtattttggtcctatccacttcaacagtgaattggatcaaacctttgaagaacatactgatgaaagctgtacacaacacagtgctttgggtggggcagctaatatgtattgctggttaacagaatcaagattcagcattatattaaataagcaaagagttgaacaaaagtcctaaccatggttcacaaaccagttctactgtacaattttagatttgacaactagattagcaaaaattaatatgaaaaagatgactgtaagtttagaatgagacaagaatggtcccaggcttcccaaaagtttatggtaactttgagtaacttaatatgtgaagtccagatcaacaaaagtagttaagttttagacttataaggaactttagcattgtctagttcaactgtcatcgttttaaagatgagagaaattaaaaattaagtgacttggtctagggagaacaaccagcttgtcacagaattggaactacagcccagatccaagacatcacaagtagctatttctattatatgccatgtagtcttaccggttactggttaaatgtatagttgaaataccacaagccagaaaaaaatagttacaaaagacatcagaataaatgtctaattataatacaaagatgatagtcattagcatttaatataattacatgttaccagaaaaagaaatataaataaagtataaaatgataactaatgatcttttaagtgacaccatctagtttttatggtggatcatccccaacattaatcgtcagagattttccagggggtgaggaggaaaaacattggtaaattaattattgtgaagtttaatattatactattgcaaagtaaatttagagcagaatcaaagtggaggatgttataaacactatgcctctttcaaataaaaggctaggggtagatttccataattacctagccatttattcatttaacaaattgtattgagcatctggttttttggcaggcatttagctaggccctgggggtacaaagatcataaataagacatggaccctgcttttgccaagatcattatttggggattcatacttagaaattagtaactatactgcaatgcagtaagtaaaataatagaagaaatatataagataattagcttatatatatttataattctaagtgttttttgattaaaggactattccaggtagtttgggttaatgtttgtactgtgaaactagaagttaacatgttaacaatatgagttaacaatatattgttaacaatattgttaacaataacatgttaacaatattgttaacaataacatgttaacaatatcagcagagtggggtcctttttgagggttgtaatgctactttttatacttgttagtcttccaatgtagcttagaaagagtgatatctctgctggaattggcaaatggcagaaaacctgcacaaataagacactctgagttgaacctttaaggctcgagctgggcagtaaggagaaagggctggggtccgggggtgagaacgtgaaagaacattctcaaaagaggaagccgcaccatacaaaaggcatggaggtgtgaaacacaagaaaatgtaaagaacctcagcactgctggaaagcatgggtgacttaagatccacaggggtcgttcagtggaattggtattaggaagtgaggccggagatgtgagcaaagcctgttcttgatcatgatagagattttggactttattgtgtaggccatgaaaaaaggaggaattacaagtcatcgttttttttttttccccttcttggagaagataaattaactagagtgatctcactcccctttcctccaaaatgtagtttttctgtgcttttagaaaacatggagcaatctgtttttatccagaggtgttcatagctaaagaatagtaggatttttttccagtttatcagggcaaaaagctgaaacagtaaatgctttgtgatttaagtaattctaaatgttttttgattaaaggactattccaggtagtttggattaatgtttgtttgtactgtgaaactagaagttaacatgttaacagtatctcagcagagtagggtcctttttgagggttgtaatgctactttttatacttgttagtcttctttattttataaagtacttcagcaaatagattaacctaaatgataaacagtttttttggatttgaacatctagactatagacaggtttaggataattctaatttatggagcttttttgttttgttggtttgggcaattttttttggtaggcaatattgcaatgtcatcacaaaaattagaacaaagactttgttcaggtatgtgtgtaccttgatataaatgttggatatactttgggattcggcttttttattaactacattgctatgtggttttcatgattataattttaatggctacattctatttcttcaagtggagtactagaactgttaaccataaaattgggcttccagttaaatctagattttattataataataaataacaataaacattttcatgaaaatagaggttattataagaaatgtatcttcctctgtagcttctggataaattttattttgtatagattgcacagaaaatttatacattgatgatacaactatatttttcaatagttttattctactctaaaatatttgtattgaggagtcaaggctaaatgtggaatttttcacaaaatttgtatacagtataagttaacagtaatatgaattagaattataaattatatttgctgaaatttttagctgtgtcttagtaaaactttcatatgatatcacttgtgttaataagctccagctgtctggaacaaggctgaggactaggaaacaaatcaaaataataataaaaattaaaaatatcttagccaaaatagttccctagtagacatttaagagatactaatattattctcattaaaagacataatatgtttctggggatagatcatgagagaagaggtctgaatcagtattacacaaaagtatatatatttaaatcaaaaattaaaaaaattaaaaatttcacttacattagcatcaagaataaaatacttaggaataaatttaataaaatgagtacaaaatttatactctgaaaactataaagtattgtcatagggaatttaagatctaactacatggtaagacattccacattcatggatctcaagatttaatattgttaagatggcagcactccccaagttgaagtacagattcaacacagtccttatcagaatctcagctggcttctttgtggaaactgaaagctgattctaaaattcatacggaatttcaagaaacccagaagagccaaaacaatcttgaaaaaagaagaacaaagttggatgactcatactttggatttcaaaatttactacaaagcagacagtgtggtgctcccatcaggatagacatatagactggtaaaatagatttgacacctacccatgaatctctagtcaattgcacttgacaggtgtgtcaagaccatacaatggggaaacaataattattttgacaagtggtattgggacaactggatagccacaatcaaaagattcaagttggacgcttacctcataccacaaataaaaaattaacccaaagtagatcaaaggactaaatgtaagagtcaaaactataaaagtcttaaaaaaaacaaacataaggatgaatcttactgccctcatatttgccagtggattcttagttatgataccaaaagcataaacagtagaagaaaaaaacagataaattggatttcataaaaatttaaaacttttgtgtgacaaagaacaccatcaagaaagttaaaagttggctaggtgcagtggctcatggctgtaatcccagcactttgggaagcagaggtgggtggatcacttgaggtcaggagtttgagaccagcctggccaacatggtgaaaccccgtctctactaaaatacaaaaattagctgggtgcgttggtgtgcttctgtaatcccagctactcaggaggctgagggcagaggtgtgtggatcacttgaggtcaggagtttgagaccagcctggccaacatggtgaaaccccatctctactaaaatacaaaaattagctgggtgtgttggtgcgcttctgtaatcccagttactcaggaggctgaggcaggagaattgcatgaacccgggaggcagaggttgcagtgagccaagatcacaccactgcaatccagcctgggtgacagagtgaggctccgtctcaaaaagaaaaaaaaaaaagaaacttaaaagtcagtctacataatgggagaaaaatatttggaaattatgtatctaacaatgggctagtattcagaatatatagaagactcttacaactcattcataaaaagacaacccaatttaagaataggcaaaggatttttttttaatggtcactttagatacactttttgtttgtttttccataggttattggggtacagatggtgtttggttacatgagtaagttctttaatggtgatttctgagattttggtgcacccatcacctgagcagtgtacactgcaccctatctgtagtcttttatcccttgtccccctcccacccttctgcccaaagtccattgtatcattcttactataagccaaagatttgaatagacttttctccagaaacaatgtaaggatgactagtaagcatatgacttgatgctcaacattgttagccattggggaaatgcatatcaaaaccacagttaccatttcataccctctagggtgactagaatcagataacaattgttggctaggggggaagtgtagaaatctgagtctttatacactgctcttgggaatgtaaaatgctataaccactttggaaaacagtctgacaatttctcaaaaagtggcagcaccccaaatgtttatcacctgaagaaataggtcaacaaaatgtggtattattagcccataaaaatgaataaagatacatactactataacatagatgaatcttgaaaacaggttaaatgaacagatccagtaacaaaaagaccattgattttgtgattccatttcatatgaaaaattcatgggagactgagaggcgggcggatctcttgaggtcaggagtttgagaccagcttggtcaacatggtgaaaccctgtctctacaaaaagatataaaaattaaccaggcatggtggcacatgcctgtaatcccagctacttgggtggctgaggcactaattgcttgaacccgggaggctgaggttgcagtgagctgagatcgtaccactgtactccagcctgggcaaccaactgagaccctgtctcaaaaaaataaaaaataaaaaattaggtcaggcaattgtgtagagatagaaagtagaggctgggcatgatggttcatgccggtaatcccagcactttgggaggccaaggcaggaggatcacttgaagccaggcatttgagaccaacctggacaacatagcaagaccgcatctccacaaaaaatgttaaaaaaaaaaattagccaggcttgatggtgcatgcctgtaatcccagttacttgggaggctaaagtgagaggattgcttgagctcaggaggttgaggctgcgctgagcctagattgcgccactacactccaggctgggcagcagaatagacactgtgtttaaaaaaaaaaaaaaactccataaaattataaaatttgccatctcaatcatttttaagtgtacaattcagtagtgtttagtatagttatattattgtgaaatacatctctagaactttttcttttcttttttttttttctcggcacagtctcggctcactgcaacttctgcctttcaggttcaagtaattctcctgcctcagcctcctgagtagcagagattacaggcgctcgccaccacgcccagctaatttttgtattttttaaatagagatggggttttgccatgtaggccagactggccttgaactcctgacctcaggtgatccaactgccttggcttcccaaagtcctgggattgcaggcttgagccaccgcccccagcctagaactttttcatcttgtgaattggaaactctatgctcattaaacaactcctactttcccctcttcccaggtaactaccactctactttctctttttattttttttatttttatagagatggagtctcactatgttgctcagactggtctggaactcctgggccttaagtgatcttcctgcctcgcccttccaaagttttgggattccaggtgtgagctgctgcacccagcccctactttctgtctgtatgaatttgactacttcagatatttgataaaagtggaatcatacagtagttgtctttttgtggcaagtttattttacttagtataacgtcctcaaggataatagtatgtatcagaatttccttcctttggcccggcatggtggcgtatgcctgtaatcctagcactttgggacgccgaggcaggcggatcatgaggtcaggagatcgagaccatcctagctaacacggtaaaaccacgtctctactaaaaatacaaaaaattagccgggcgtggtggcgggtgcctgtagtcccagctacttgggaggctgaggcaggataatggcgtgaacccaggaggcggagcttacagtgagccaagattgtgccactgcactccagcctgggcaacagagtgagactctgtctcaaaaaaaagaaaaaagaatttccttcctttttcaagttgaataatccattgtatgtatatatcatattttgtttagccattcactcatcaatggacatttgggttgcttctatctttgggctattgtaaatggaactaagttggctgtttctgaatgcttagcataagacaccaacagaatagagttttgatttggagggagaagcagcagttctgaagataaaatatgagaaaaggggccgggcgcagtggctcacgcctgtaatccttaacactttgggaggccgagccgggcagatcatgaggtcaggagattgagaccatcctggctaacacagtgaaatcctgtctctactaaaaatacaaaaaattagccgggctatttttatagaaccgcttgaacccaggaagctaaggttgcagtgagccaagattgcgccactgcactccagcctgggcaacagagcaagactgtctcaaaacaaaacaaaacaatacaaacaaaaaaaaaaaggtaagtctgagtggaatgactacctattttgccctggttgtcctgggtggtcagtgacgattgttatatcagctcaactcacagcttccaaagacttcttgagaagggctgtcttttttcaacatgctgcttggtgaaatgcaaagtgaatttgataagcttattacccttattcagaaagaaagggcttgaacaagctgaaacctttatgtgtgtgtgtgcgcgcgtatatacgtgtacttctttttaattaacagtatcgtcctctaatgtaggagaacttatgctttcttatttatcattttagtaaaactaggtcatgtcctcatccagtgtatgaatataccacattttgtttatgcattttgtttatggatattttatttgtttctgttttgttttttttttttttgagatggagtctcgctctgttgcccaggcttgagtgcagtggtgcgatctcggcataccacaacctccgcctcctgggttcaagggattctcctgcctcagcctcccgagtagctgggactacaggtgcgtgccaccatgcctggctaatttttgtatttttagtagagatgggatttcactatgttggccaggcttgtcttgaactcctgaccttgtgatccgcccacctcggcctcccaaagtcctgggattacaggcgtgagccactgtgcctggcctgtttgtttctgtgtatgaatactctatgatccagaaattccactctgggtattcacttaagaaaatgcatatatatgtgcaccaagaaacatatttaataatattcatagcagcattattcctaatggcccaaactgaaaacagcccaaatgtccatcaacagtaggacagataaataaattgtgatatattcatacaatggaataccatctagtaatgaaaaagtatgaactactaatgcatgcaagaaagtgcatgaatctcacggacgtaatcaaggaaaagaatgcagatacatgagaatgcttattagataattccatccatatgatgtcaaaaataagcaaatgtgatttcctacaatagcagtcaaaacagattacctttggttgtgataagtaggagttagtcattgagaggaggtaccagaaaacctactggtatgctgaaaatgttctctttccaaatggtagttacatgggtgtatgtatggatatataaaaattcaccgagctctacagttaacgtttgtgtgctttactgcatgtaagttatacctcagtaaaaaagaaaaagtaggtgtaaacaaaattacaaaaaaaggtggatcatttgtgcaagaggattgaaatttgttttttgatgttaacagtgtatgtcagtgatcttcataccacttaggtggagctgcttcataatcactggatctaaacaaagctgaaaattatgtgccagaccctttaggaaattgtccaaataattaacagtaaagcaagacttaaaaaaaagtgaaacacataggttaacgttgctcctttttacataaatgctttcataaagattaaaaatttttagatgtggggtgtagttgcatcagtgggatctatgaagttctcattatactctgtcttctcctatatgtacattagttgagtacctaattttacataaaaatctacttttatggctgggcacggtggctcatgcctgtaatcccagcacttgggaggccaaggcgggcagatcacgaggtcaggagttcgacaccagcttggccaacatggtgaaaccctgtctctactaaaaatacaaaaattagccaggtgtggtggcctgtgcctgtagtcctgactacttggaaggctaaggcaggcgaatcgcttgaacccgggaggcggagcttgcagtgagctgaaattgtgccactgcactccagcctgggtgacagaatgagactctgtgtccaaaaaaaaaaaaatatatatatatatacacacacacacacacacacacacacacacacacacacacacgcacatacatgcatatatacttttacccctggactgggtgtggtgactcacgcctacaatcccggcactttgggaggccgaggcgggtggattacctgaggtcagtagtttgagacaagcctggccaacatggcaaaaccctgtctctactaaaaatacaaaaattagccaagagtggtggtgggcacgtgtaatcccagctactcgggaggccgaggtgggagaattgcttgaaaccggcggggcagaggttgcagtgagctgtgattgcaccactgcactccagcctgggcaacagagtgagactccatctcaaaaaatatatatattttaatagataataaaataatattaatatattattcaaatatatcaatattaatatattattcgaatatatcaatattaatatattattcaactatatcaatattaatatattattaaatatatcaatattattattaaatatatcaatatcaatatattaaatatatcaatattattattaaatatatcaatattattattaaatatatcaatattattattaaatatatcaatattaatatattaaatatatcaatattaatatattattaaatatatcaatattgctatattattaaatatatcaatattaatatattattaaatatatcaatattaatatattattaaatatatcaatattgctatattattaaatatatcaatattgctatattattaaatatattaatattaatatattaaatataccaatattaatatattattaaatatattaatattaatatatttattatattaaattttattattttaatattaataacaatatgaaaacttgtagcaggggtaaaagtgtgtgtatatgtattattttatgtatgtacatatgaatgaatgaatgacagggtctcactctgttgcccaggctggagtgcagtggtgcaatcacaggtcactgtaaccttgaactcctggactcaaaggatcctcccatctcagcctcccaagtagctagggctgaagggtgcaccacaatgcctggctaattatttaatttttttgtggaggcagagtctcactttgttgcctaggctgatctcaaacccctggcctcaagtgattctctcaccttgacctcccaaagtttttggattacaggtttgtgccacagcacccagcctccaactttattaataacatctatatttcctctcaaaacttgcatcactgtctagaatagaggtctatattcttattggcaggaaaatatatttgactattttgtctaatgatcaagttcaagtcactgacgttgcatggttctagttcttccggaattgattgctttaccttgaactctgttcatgattgttttttcactttcaactattttctttttcttttttttttttttttgagatggagtctcgctctgtcacccaggctggagtgcactggtgcgatcttggctcactgcaagctctgcctcccgggttcacaccattctcctgcctcagcctctcaagtagctgggactacaggtgcccgccactaccaccagctaatttttttgtattttttattagagacagggtttcactgtgttagccaggatggtctcgatctcctgacctcgtgatccacctgcctcggcctcccaaagtgctgggattacaggcgtgagccaccgtgcccagcctcaactcttttatttttcaaaggactgttgtaccttttttttcctacctgggtggctgaaatatctcattggtacgtcactctttttcattttcatgggttcccatttgaccttttaattttccacattcatattctagaggtcttcaaataataaatgatccgtctgttctgaaaaagtacttcaattctgtttcagacccataatgaaatatttactgataaaatgatgtaacatctgagatttgtttcaaaataataaagttactgaaattgggtaggttacatgggggaaaatcatatgcctttgaagttatgcataaaaattttaaaaatacaaaaatactttggtatttctctgctgcagaaaatcatactttctagaatgattcactccagtttttctgcccaccactataatatagaacattttacaaattttctttgtaaagcataggcccttgaaagtacatagacactttctgaaaaatggagtatgagtcctgctttgatgctatttataaatgactttcaacttctccctttcttttggccctggctgccttttacctcactccacgtagcctcactttagactttcagatgttagaagcactctcatttttcttactaacagattaatcagaatatcatgtgtaataccttaggaaagttatatagaaactagtccagccactgaccagcttttcattgcaaaatgaaataattgaaactgctttttagaagatttttattgatggctcttattattctttgatcataactcacactaaaaaaattgtgatttaatatacacatagttaatatctgtgtatatgaagtttcatgaaataatattttatccttactgagtataatgtactctgatactttttattttatatattttttctttaaaaaatttggtcaagacattctttaaaatcaatatttgaatgtatttactttatatcccactaatggatcatgttctacactttagaaaacatttgagcattgtctgtcttgttaataataaacatgctgtatataccatcccagtgatattaagctttaataagtttttcttttattataatgtacttattgttgttgataggtaagccctttaaaaaacttgacacaagaaaaaattattcttgccttaactactaatcatttgggaaatgtttctgcatagtatactaatattttaatactattaagttagtaaaagtgaaaacattatctgctttttttctttagagttgtattgctatcgttatcttcttacccctaatcatactgctcacttaaagagatgctctttgggccgggcaagatggctcatgcctcccagcactttgggaggcccagacgggaggctcacctgaggtcaggagtttgagaccagcctggcaacaaggtgaaacccatctctactaaaatacaaaagttggttgggtgtggtggcatgcacctgtaatcccagttactcgggaggcagaggcaggagaattgcttgaacctgggaggcagagtttcagtgagccaagatcatgccactgcactccagcctgggcaacatagcaagactgtgtctccacaaaaagaagagatgctttttgggtggaggtggcaataggccaacctgtcctctttgccctaaatagacatggtaatcatctgagttatataaaagtagttacttgttttaactactaattgcctcaagttcatttggctggattttttacaagttctaggtagtaatttatacatgtactattttcactgaagggcaagaaaatgtgacagctggagctctaactaaacagactgtatgttcctttatcagtatggctctgagaactgagaactcctagttctttgaaataatgcagtgtctgatgaagcttacggtgaatgttgtctctgtaggtgacttacagaaacaggaagtcttcatgcagagggttttatggacagcatcacatccaggactgctgctttgaaagggctgagtttaaatataaagctccaaaaactactgtgtaatgcagttccttttctattaagaataaaggaaccaatagccaggaagtgagcttgggaagcgttgtggattttgtgcaacagatactaaaagctttcagtgcttgggattgtgccagctcatcaatggtacttttctgtccattaaatggctttccttcctcatagttattggtatgcttttatttttatttttttagctgaagcagttatttattttaaatgggcagggttttaacataatctttgtaattaaattcatctggagcaaaatttttgagtactgtgtattatttaggatagtggctgagtgattgtctaaatttctgaaacatggctgcattttgtgttgacctgtaaaattttaatgatgcatttgtgcccttgcaaagaaattcatttgaggcaatgcttagctcaggagacttatcaagtcacctccagtgcctcttaagaaaaagggtaacatgtatttgattcttttggtgcccttagagaaattaagtaaacgcaagctagcattttgtgatgtatcagccactatgttgggtgttacataggcttgtctcacttattatacttctgtgattatactcttttatatacatgtgaaaatagaagctaagaagcattttataatttgtctatcacttttaggtttagtgagaatttgcaggaatgcatcatagtagcgtggaatgatattgtttactctcctaactaagtctgttctccgctaattaagagcatcatttagaccaagcttgttcaacctgtggcctgtgggccacgtgtggcccaggacagccttgaatgcagcccaacacaaaattgcaaactctcttaaaacattatgtgattttttttttttttttttttagctcatcagcttttgttagtgttcatgtattttatgtgtggcccaagacaattcttccagtgtggcccagagaagccaaaaggttggacacccctcatttagacccttccgttttccttatccctcacattacatgtaatccaaacgttgttaggttttccttcaaaataccttgcatgaagatcctattctagtcctcttaggaattattacctcttctctgctataataatagaagtaataaaaattagacttatctagcaccttgcagtttacaaaatatttacacatattctatcatcttcataaagctctgtgaaatagttattctttatatgttctgttataaaaacattttattcatcttctttctaattacctcattcacttctgttttatacattggggccagattaatattttttattttgtttataactgacacataataattgtacatgcttatggggtagagtgtgatgtttcaatacatctgtacattatataataaaataagggtagttagcatgttcatagccttcaatctttatccttcctttgtgataataactttcaagattctcttgtctagctatcttgaaatatacagtgcagtaagttctcacttaacttcatcaataggttcttggacactgtgattttaagtgaaaccatgtataaagaaactaattttacagtggggtaattgataaaaacaagagttaaggccaggcacagtggctcatgcctgtaatttcagcactttgggaagccgaggtgggtggatctcttgagcacaggagtttgagaccagcctgggcaacatggcaaaaccctgtctctacaaaaattagctggatgtggtggtgcattccaagatttcttgagcctaggagactgagactgcagtgagctgtgattgcaccgctgcactccagcctgggcgacagagcaagaccccattccaaaacaccaccagacctgccttacaagagatcttgaaaggagcaataaatatagaaaggaaagactactaccagctaatacaaaaacatacttaaatatacaaactagtgaaactataaagtaacctcacaaacaagccagcataataaccagctaacaacacattgtcaggatcaaatccatacctatcaatactagccttgaatgtaaacaggctaaatacccccatttaaaagtcacagagtggggccgggcgtggtgtctcacacctgtaatcccagcactttgggaggccgaggtgggcggatcacaaggtcaggagattgagaccatcctggctaacacggtgaaaccccgtctctactaaaaaatacaaaaaaattagccaggcatagtggcagacgcctgtaatcccagctactgaggaggctgaggcaggagaatggcatgaacccaggaggcagagcttgcagtgagccgagattgcgccactgcactccagcctgggcgacagagcaagactccatctcaaaagaaaaaaaaaaaagtcacagagtggcaagctggataaaaagcaagacccaatagtatgttgtcttcaagagacccatgtcatgtaatgatatccgtaggctcaaaataaaaggatggaggaaaatctaccaagcaaatggaaaatagaaaaaggcagggattgcagttctaatttcagacaaaacagactttaaaccaacaaaaatcaaaaaagatagaaggacattacatagtggtaaaaggttcaattcaataagaagacctaactatcctaagtatatatgcacccgacacaggagcacccagattcgtaaagcaagtttttagatacctacaaagagatgtagactcccacacaataatagcagcactccactgacagtatcaaacagatgattgaggcagaaaattaacaaaggtattcaggacctgaactcaacattgcaccaaatggatcttacagacctctacagagctctgcacttcaaaacaacagaatatacattcttctcatcaccacatggcatatactctaaaatcaaccacatatttggacataaaacaattctcagcaaattcaaaagaaccaaaatcatatcaaacacattcttgcaccacagtacaattaaaatgaaggccaaggctgggcactgtggctaacacctgtaatcccagcactttgggaggccaaggtgggctgattgcttgagctcgggagttcaagaccagcctgggcaacatggcgagaccctgtctctactaaaaataccagaaaaaaataggtgtggtgatgtgcacctgtggtctcagctacttgagaggctgaggtggaggattgcttgcgtcttggggaggcggaggttgcagtgagccaagatggggccattgtagtccagcctcggtgacagagtgagaccctgtctcaaaataaataaataaattggccgagttcagtggctcacacctgtaatcccagcactttggcaggctgagacaggcggatcacttgagttcaggagttcaagaccagcctggccaacatggtgaaaccctgtctctactaaaaatacaaaaattagctaggtgtggtggtacatgcctgtagtcccagctactctgctcaggagactgagtcaggagaatcacttgaacgcaggaggcagaggttgcagtgagctgagatcgtgctgctacactccaacctgggagacagagcgagactctgtctcaaaaataaataaataaataaaatacacacatacatagtaaaataaaatagaagtcaagactaagaaaatcactcaaaaccatgcagttacatggaaattaaacaacctactcctgaatgacttttgggtaaataatgaaataaagacagaaatcaagaagccctttgaaattaatgagaacgaagatacaacataccagagtctctgggacacagctcaggtagtgtttttttttttttttgagacggagtctcactctgtcacccaggctggagtgcagtggcacgatctctgctcactgcaagctccgcctcctgggttcacgccatgttcctgccttagcctcccgagtagctgggactacaggcgcctgccaccacgcccggctaatttttttgtatttttagtagagacggggtttcactgtgttggccaggatggtctcgatctcctgacctcgtgatccgcccatctcggcctcccaaagtgctgagattacaggcgtgagccactgcgcccggccacagctcagatagtgttaatagggaaattcatagcaataaatgtccacatcaaaaagttagaaagatctcaaattaacaacctagtatcacaatgaaaataattagagaaacaagaacaattcaaccccacagctagcagagaagacaaaaaataaccaaaatcagagatgaaccaaaggaaattaagacatgaaaaaccattcaaaagatcaacaaatctagaagttggtttcttgaaaaaaaaaattgataaataggccactagctagactaataaagaataaaagagagaagatccaagtaaacacaattagaaattatgaaggggatgttaccactgaccccacagaaatacaaacagccatcagaggccaggtgtggtggctcatgcctataatcccagcatttagggaggccaaggtgggtggatcacttgagggtcaggagttcaagaccagcctggccagtatggcgaaaccctgtctctactaaaaatacaaaaaaaattagtcaggtctggtggcgtgcacctgtaatttcagctgctggggaggctgaggtgggagaatcacttgagcctgggaggtggaggttgcagtgagctgagattgcacccctgcactccaacgtgggtggcagagtgagactccatgtcaaaaataaaaataaaaatagccatcagaggccgggcatggtggctcacacctgtaatcccagcactttgggaggctgaggtgggcggatcacctgaggtcaggagttcaagaccagtctggccaacatggcaaaaccctgtctctgctaaaaatacaaaaattagctggacgtggtagtatgcacctgtaatcccacctactcgggaggctgaggcaggagaatcgcttgaacccgggaggcagaggttgcagtgagctgagatcgcaccactgcactccagcctgggccacagagcaagactccgtctcaaaaaaaaaaaaaaaaaaatagccatcagaaactgctacaaacacctctgtgcacacaagccagaaaacctagaagggatacataaattcctggacacatacacctgcccaagactgaaggaagaaattgatttcctgaacacaccaagaatgagctccaaagtccaatcagtaataaataggctaccaaccaaaaacccaggaccagatggattcacagcctaattctactggatatgtaaagaagaactggtgccatttctactgaaactgtttcaaaaagttgaggaggagtgacctatggcatacttctgatcacaaaaacatcaccaaacttctagataaaggcccaaaacacttgtaatgttaaacattgaaataaatgtgggctatacatacatttaagacagattaataaaaacaagataattaccctttttttttggtgaatcagtgagtgatggcagcacaatggtagtgggtaaaatcaaggaataaatgtttgcaaagcaaaaatggtaaggagaatatcctactactgtgcagtgcaaaaacaaatatagcaggctccttgagcacttttgtactgcattgttgattgtcttgcatatgtatgattaccataggctagaattttaattttacaataatttgtattcatgcatttttccaacccacttatcccagttcagggtctcaggttgccagaccctatcccagcagtttagggcacaaggtgggagtcaaccctggaggaatgtcattccgtggcgggatgctgacacacacacccacattcacttatcctgggacaatttaaacaccccagttagctcaaaaacaattgaaataaaaagaataaaaaatgaaatactgtgtgttccctaaaaaacaaacaaaacaccccagttaacctaaggtacacatctttgggatgtgggaagaaactggagtacccagaagaaacccacacagacatgaggagaacatgcaaactctacacagatggtagttctggctgggaattgattttttttctcatcagtgttataacatgaaatgatgttatttaaggtccttttgttagctatagtcattctactacttaatagaacactagaacttattcttaaaatctcactgtaactttgtacccattgacaaacctttccttattcctcttccttctccctccccagcctctgataaccaccattctgttctctcctatgagatcagctttcctagattccacatataagtgagatgatgcaggatttgtgtttctgtgcctggctaatttcacttaacatgttctccatgtttattcctttgccacaaatgacagcacttcctttttatagctgaatagtattctattgtatatatgtacattttcttttcatctattgatgtacacttaggttgatttcatatcttggctattgtcaatatgctgcagtaaacatgggagtgcagatatctttttggcatactggtttcctcccctcccctccccaattttatttaaaaaataaaatttattttactttatttttttgtagagatgggttttgccatgttgttcaggctggtcttgaactcctgggctcaagtgatcctctcaccttggcttcccaaagtgttggaactacaggcatgagccaccatgtctggctgacatactggtttcaattcctttgaatatatacccagtagtggaattgttgggtcatatggtagttttgtttttaattttttgagaactcttcatattgttttccataatggctgtactaatctacattcctaccaacagagtataaaaatttccctctcttcacattcttgccagcatttgtttttttgataattgccattttaactggagtgaggtggtttctcattgtggtttcgacttgatttccctgatgatttgtaatgttgaacattttgtcatgtatctgctagccatttgaatgtcttcttttgagaaatgtccattttggttttttgcccatttttaaattggattatttggggttttttgttagtgagttgttcaagttccttatatggtctggatattaaccctttgtcagatgaataatttgcaaatattttttccctctaggttgtctcttcactctgttgagaaacttttaaatttgatataatcccatttgcctgttttcacttttgttgccagtgctgtttttctttttcttttcttttctttttttttttttttttttgagataaggtctcgctttgtctcccaggctggagtgcagtggcacagtcttggctcacttcaacctcctcctcctgggttcaagtgattctcctgcctcagcctcccaagtaactgggattacaggcgtgcaccaccacgcccagctaaatttttgtatttttagtagaggtggggtttcgccatgttggccaggctggtcttgaactcctgtcctcaagtgatccacccacctcggcctcccaaatgctaggatgagaggcatgagcctgctttgcttttgaggtcccatccaaaacatctttgcctagagaatgtcatgaagcatttcccttgtgttttattctagtagttttatagttttgggtcttacatttaagtctttaattcattttgagttgatttttgcataaggtgagagataagggtctactttcttccttctatgtgtgaatatccagttttcctagtaccatttattgaagagactgttttccccagtgtatattcttggcatctttgtcgaaaatcagttacctgtaaatgtggagatttatttctgagttctctattctgtttcacttgtgtgtttttatgccagtgccatgctgctttggttactatagttttctaggagatttttgcattgggtagagtgattcttttggctttgttctttttgcccaagattattttggctatttggaatcttttgtggttccatatgaattttaggatttttttttctctttctgtgttgaatgtcattggtattttgatagagattgcattgaatcttgtagatcgctttgggtggaatggacattgtaacaatattcttccgattttttatttttattttttttaagagacaaggtcaggggctgggtgtggtggcttgttcctgtaatcccagcactttgggaggccaaggcgggtggatcacgaggtcagtggatcatgaggtcaggagatctagatcatcctggccaatatggtgaaaccctgtctctactaaaaattcaaaaattagcagggtgtggtcctcatgcctatagtcccagctactcaggaggctgaggcaggagaattgcttgaacccggtaggcagagtttgcattgagccgagatcgtgtcgctgcactgcagcctggcaacagagcgagactctgtctccaaaaaaaaaaaagagacaaggtcttgttttgtcacctcggctggagtgtagtgacatgatctcaaagatcctagactcaaacattcttcccatctcagtctacctactagctaggattataggcacttacccctacacctggctaattaaaaatttttttttgcagatgcagtgtctcatatgttgcttagctgctctcaaactcctggcctgaaatgatcctcctgccttggcctcctgctaaagtgctggcagtaataggcataagccactgtgactggccaattttcttccaatggatatatttcatttttggtgtgtgtgttcttcagtttcttttgttggtattttatagtttcccttgtagagatcattcacccctttggttgaatttattcctaggtttttttttttttttaaagctattgtaaatgggattgtcttctgtattagtctgttctcatgccagtaataaagacatacccaagactggctaatttataaaggaaagaggtttaattgattcatagttccacatagctgggaggcctcacaatcatggcagaaagcaaaggaggagcaaagtcacatcttacatggcagcaggcaaagagagcatgtgcaagggaactcccctttataaaaccatcagatcttgtgagacttattcactatcatgagaacagcatgtgaaaaacccaccccatgattcagttacctccctctgggtctctcccactatacatgggacttatgggagctatgattcaagatgagatttgggtggggacacagccaaaccatatttcctcccacacactgtgtgctccgattatattctcaatttctttttccactggtttgtttttggcattagaaatgctactaatttttgtatgttaattttgtatcctgtaactttactgaattcatttattctaatagttttttggtggagtctttgggattttctatatatatgattatgtggtctgcaaacaggaacagtttgatttcctcctttcctatttggatgccctttcttttgcctcattggtctggatagggctttgaatactatgttgtataaaattggtgaaagtgggcatccttgtcttgttctagtcttttgaggaaaagcttttaatttttccccattcagtctgatattagctgtgagtttgtcatatatggcctttattatgttgaaatgtgttccttttatgcctaatttattgagagtttttatcatgaagggatgttgaattttatcaaatgtcttttctgtgtctgttgagatgatcatatggtttttgtctttcattctgttcatgtgacgtgtcacgtgtattgatatgcatatattcaagcatccttaacatccccgggatacatcccatgtgatcatggtgaatcatcttttagtgtgttgttggatttagtttgttagtattttgttgacgatttgtgcctctgttttcatcagggatattggcctgtagttttattttgttttatcctggcctggttttggtatcagtgtaatgctggactcagaataagtttagaagtattattcccctcctctttggttttttgaaatagtttgaaaagaatttatattttttctttcaatgttggatagaattcagcagtgaagccatcaggtcctgggctttttctttgctgggggagtctttatcattgcttccatcttattacttgttattctcttcaggttttctatttcttctgactcaatcttggtaggttgtatgtatgtttccaggaactattccatttcttcagatttttaaacatttgttctcatatagttgtcagattaatattgtaaaaatacaactttcaccatttgcttttccccttcgttcacagcaaaccgaagaatgaagttaaaactcctatatttgcatttaggattatctataatcttattctaaactagcctttcttttttatcacccaagaactttctcacaagaactttctacatatatcaagtcaagttgttcactttagcatctcttacctactgaatgtcagatactatgtttgtttctagggataaaaagatgaattaaacgttactgtcctctggaaatttactgccgagtggaagtaaaaaatatatgcataaataattataggtagaagtttatgaaattgggtgctggcttagtcttaagactagaaagtatatttagaaaagggctttttttttttttttttttttttttggtaaacaaaaaggcataaaaccacaaggaaccaaaaaaatggaagagaaagtgaaaacagactgagaaatgttaacaaaattttggaagctgaaacacagatggttaggtggtaactgacttagcactccagacaaggctgagtgcctgaaggggcaggccggttaatgctataaaatataccagataggcttaggaattggagacactaggaacttcacaaaggtgggatgcagaaggggctaaaaatggaaaatttagttgaaagtcaactgcactgtgaaaagcggctgcccagctaaatgcaggaaaaataaggaaaaggttgcacactgagcctgggagcggtggctcaaacctgtaatcccagcactttgggaggccaaggcaggcggatcatgaagtcaagagatcgagcccatcctggccaacatggcgaaaccccgtctctactaaagatacaaaaactagttggtcatgttggcgcgcacctgtaatcctagccgctccagaggctgaggcaggagaatcgcttgaaccatggaggcaaaggttgcaatgagctgagatcatgccactgcgctccagcatgggcaacagagcgagactctgtctcaaaaaaaagaaaaaagaaaaaggttgcacactgaatgatgagactcctcaagacttcttgtggaagaaacaaatatgtaagtgcccaggatttctttgaactcttgcttttttttttttttttttttgagatggcgttttgctcttgttgcccaggctggagtgcagtcgtgtgatctccgctcactgcaacctctgcctcctgggttcaagctattctcctgtctcagcctcccaattaggtgagattacaggcatgcaccaccacacctggctaattttgtatttttagtagagacgggggtttctccatgttggtcaggctggtctcgaattcctgacctcaggtgatccacccaccttggtctcccaaagtgctgggattacaggcgtgagccattgcgcctgactgcatctttttcttcaaaagaaatctatgcacaatttctataatatagtaggtttgtttttatgtaaataaaaagactttatccaaatcttcaaatgaaaattaggatccaagaaaagtgtatcttacttgtcctgtagcttagtgcacaaaggccttggcacacttccaagtacccacaggtacatacctcagagtggggacctggcattggatattattcataacctgtccttagcttagtggatgtttatggcttttcttctgtttcttcccacacactatgtgctccgattatatgggtctacccacagtatatcacatcctgtgcattttctatcatttatccatatcattgttcaaattagtattttttaaaaatagaaaatgccttttattctctcctctgttcatccgtcaggactcacttcaagtgctgcttgtgcccaaattcactaccctccgtatccaagctcttctactgactcatttgtatttctgttttaacactcactatatcatgtgatttatttgacacacttttgagccaccacatacaagaccttgtgtgaggagctagaatacagtctatgaagggtgagaactgaggttgctcatcttagatgtctggtatctgtgtagatgggcattaaatattcacatgcttttccctacttctgttctcttatttttctagttaatcttgtactacctcacaatgctcatgcaaaatcacagatcttatcaggtcataaaacctttcattttaaactttaagatagcattgatgttctgcaattatacaggaagtaggaacagggaaaaatggtattaatggcttttttttttttttttttgagacggagtcttgctctgttgcccaggctggagtgcaatggtgcgatctcggctcactgcaacctctgcctcccaggtcaagcgattctcctgcctcagcctcctgagtagctgggattacaggtgcacactaccacgcctgcctaatttttgtatttttagtagagacagggtttcaccatgttggtcagactggtctccaactcctgacctcttgagccacctgcctcgccctccccaagtgctgggattacaagtgtgagctgtaattaagttcttagggttaagcctgtgctaaaattagttggttttgttttgttttttgttgttgttgtttttgagacagagttttgttcctctctcccatgctggagtgcaatggcatgatctcagctcaccacaacctctgcctcccaggttcaagtgattctgttgcctcagtctgctgagtagctgggattacaggtgcccaccactacccccaactaatttttgtatttttagtagagacagagtttcaccatgttggccaggctgttctcgaactcctgacctcaggtgatccacccacctcagcctcccaaagtgctgggattacaggcatgagccactgcacctggccctaaaactagttttaagtcacagtaacaatgctcatttcatttcaggaagagctgtcctgaaaaatctttgcgcagagtcacatctggtgtgcaagaagtcctgggccaaattaaagttttaatcggcctgggaattggctgtttgttactgcctcatctgttcctctcttacttattactatcctttttataatttcatgaaatatattttaaaatggctttggtgggaacattaataagaaacataaagtaacctttagaaggttaatgcaaacactatatatatgagagaaatgcctatttttgacttgtgctcccctaaaaaagaagttattcatcttatggtttctgaggtgtttgacctaagaaaccaacctgttagtcttctttttatcttacttgcagacaaaaattattcctaaattagtgtactctttgacacgtaaaggtactcgcaatctgatggcagtatgaaaagtttaatgatgtagttatattgcagagggccttctgttgtctagaggtttgtaaatgagaatttgtattgtaagcagctttttttgtttgtttgtttatttatgagatggagtctcactctgttgcccaggctggagtacagtggtgtaatcttggcttactgtagcctacacctcctgggttcaagcgattttcccacctcagcctcccaagtagctgagattacaagtattcaccaccacccccggctaatttttgtatttttagtagagacagggtttcaccatgttggccaggctggtcttgaactcctgacctcaagtgatccacctgcctcagcctcccaaagtgttgggattacaccacacccagcttgtttttttatttataaaaacaatgcattatataaaaatcagaaaatactaaaatagtaaaactattttatattccttttatattctttttcacgcacatatattccgctatgtattacagaaatataacatttactggtatattttaaaaatagttatgctgtacgtacagtaccaataacttttaatcagtcgagattttgagtgttttatatgtgctgaacatggtcttaagcaccatagggtattgagaaaacttaaaatccctatcctcaagatatttacactctagctggataagaaggcaaacgtgtaagaagagatgcgaagttcagtgcagtggctgaactacatgatatgtactaagcactcaggaggaattaaagttaaggcttccaaggactagtgaggatggggaggtgagaggagctgagtatccagcatatattacaggttcagtaagtgaatgttgttgctctggccctcatcatcattccaagttcttagtctaaacgtctgggaatattgattacatttgtagaaataggaaagtttaaaggaaaaaccgttattgcaggaagaactttgagatgtgtaagtgttgtctagctgaagatctgtttcctgtaaatagttaaagatataagtctgttgttctggtaaacagtcaaaacagctttgagaatcatctccttacaagcagtagatgaattctccaaaagtaggtttgggcaataattggttttattcacactgtcctttatgccatccaaagttgacacgaaataccatgacaaaatatatagaattctatttgccagttagttcgaagaatgaaggtttgtgtttattgtgccaagagctaaaatctctttgaaattctggcatttcttcttgaattgccttgtggcttaatagttgggaaatattaatatgcatgcatgtgtgtgtgtgtgtgtgtgtgtgtgtgtgtgtgtgtgtgtaagagagatttgttttctcttttaggaaaattctcaggtatagcttaaatttctaaattttcaagctgttctagccttgctagatctcattatctctgtagcttttcgcttataaatcaagtttcatttatgtgaacagcattgggaatataacctttctcatgaccctgtaagctaatattttgctttgcttttcccagaataaatgtcactaaaacatatacattctgctttcctcttaggtaaaaatctctacaccaatgaatatgtagcaatcaaactggtgagtagaatctgtttgtggtaattaatgttttggtgctcccattgcttatatctttttataggaaatagttttaagcattcattcgcaaaactgctaatggtttggggttttttttgtgtatgatcccacatttttcttcatttatagtgttaacagtgatgaatcactgtatactatataacactatatagttaaatgatactaactttagtgttagcaatgatgactcaaaaattagttgattaaaaaaagctggaagaactagtaactctgtgaacttaatctttcacagaggtatcttaaaaagataaaatcattcaaaaattttactgtttttttctctaacttaactgatttattttttgtacttagaagaaaatcataactgatcatctaatcatggccttaaaaatctgtcaagcatggaaaacataccatatggtcatattagaagcaaagaagtcaattggtatattagtactaaccttgtgaataattaaactagtcatagaaaatgatatcctatttaaaaaagtaataattttattatttttgaggactaataattttaaaagacagaattctttatcttatatttaaggttgataacaaaaccattttttcatgtgaaatgtttcgtatgactagtttcactgaaactctgtgtttgtcctcatagtaagtgtcccaggatttacaggtagctttgttttattagttggaagccagaggagttaatggttgaaggaaattgaaggaaatctatgctattcttttcttttctttttctttctttctttatttttttttttttggagacagggtctcacagtgttgcccaggctggagtgcagtgatgtgatcttggctcactgcaacctccgcctcctgggctcaagcaatcttcccacttcagtctgcctcctaagtaggtgggactacagactacatgccaccacacctggctaattttgtattttttgtagagatgggatttcatcatgttgcccagctcggcctcccaaagtgctgggattacaggcgtgagccaccacgcctggcattgttattttctaatgaattgcacttaccacatccacacttgttctgtgattggttgttcttctcatccagcttgcttgtggaggagttagggttgtcttgtgaggaactgacagttaccagatttgtttccctacaaaggggtgggtggacagggagcagggcttagagcagcaggtaccttctaggaaaccaagtatttttgtattttgacttggaactcttgttggatagatgggagcaggaagagaggtaatacatgtaacaatgcaggtcaaatatcctcttagattgaatattagaggattaaccgaacagacacagtggctcatgcctgtaattcaagcactttaggaagccaaggcaggcagattgcttgagcccagaagttcaagaccagcctgggcaacaaggcaaaaccctgtctctacaaaaaatacaaaaaattagtcaggtatgctggcacacacctatagtccccactactttggaggctgatgtggaagaagtcacctgagcccaggaagtcgagactgcagtgagctgagattgcttgcacctctgcactcagcctgggtgacagagtgataccctgtctcaaaaaaataatattaaccatattttttaatttataggaatttggttattcttaaaagtgttctctagtacacctgctttttttactttttctgttttattattctgataagttggaataatctttgattatttgggacttctaagagaacaaagcacttcctaaaacactttaaaaatttgctacattactacatatttgttaggctttctgttagggacagttctttcatcttgatttcttctgccaggttataccaatcaacctgtatagataagcttacataacatattgttgacatgattgatcgttacatttcatttcctttttaaaaacttttattctgctttgtatggccactatttaaagctaaaaatggaactcttacaatctagtatggtgtgactcagtaccgcatttctctttcaaataagtctcaaagccattttagaggataacagttttgtctacaggctttcattcttgcttttgggcttctgttctccaaaggaagatatgaaggcagtaattgagctctttggattgtaatggtcaatttgccttaagcactacactcctataaggtagctgtctgctgtttgtttaggattttaggcaggcatatgttttccagaatatggtaaatattctggcaaatgcacagccctctatggaaatgtaatcagcatctggcacagaaatgcaaggaagctctgctgctgctgtttctgttgtactttgtttggatcttcattgtggactcttttttcttagatttcttagatttctaaaaacctttaaaaaaatcgtacacaaagtaaacaaaatagtgtaatgagcccctcctttatccatcacccacatttctagggttctttttaacagaggttttctaacagttgggtttaaaaaaaaatctcctgtgctgctaatattgctgccttctgtagtctgtagactgagttttgcaatgccttctacttatagtgcttccagaaaagcaccttgaagcccaattggctgagcaggctatggccatgtgctaaggagttggctgaagtgtgtaattctctcagtcttcataataagaccctcatgtctgaatatatgtgatgtgtatgcctttcaacccttgaactctatggagttttgcatttttaatttactagcttggctacccaacgtcagattgaatattttctattatgctttccagcatgaagattgagagtataatatttgaggaaggatgtgtggtttttaaaattcattgcctctgtggtttgtcagaatccaaaagcgatttctctggaaagaatagtcccttttctagtgttttgatcgacttctagttccatgttgatttgtcatcactgtttctgtttggttccttgtgaattcttagttattttgctaatggaaaaattctatacctggctgctttgatagtgattcagtggaatatctgcaaccagatggagacataagagtgatatgatacctctctatctgaagagataaataagaaagggactctacagtataattagtcttatgtacttttctttttactgaaagtcttgagacacttgaagtccaactctaatgattgctgattttatactcaaacaagggtatgagttctttcttcatagcgcttcctacagatacaaacattccagtctggcctgaattgatttagagaaaatcttcctagaagcagagggatagactagacaacttcggagaaacttctgaattctttgattaatggattctatatcttaagaaaaatgcagaaaacttcaagtggattcaggaaagagccttcaaagatgatcaaagaattaaaaactaggaccaatgaggaaaggtgaaaggaatttgaaattactttgcctaagaaaagaaagtctaggaaagcctgagaaaagtaagttttgttatttgaagagagctacttaatagtattcgtggttattgaggagcttttttatttttttgctgaggacttaagaaaaataggcttaagtttcagtagtgagatttgagtataatataaaagtgttccaaaccatgaaacttgttcaacatcagcatgaattgtcgagggaagttatggaatctccttccttggagtctgtcttaaacataagacaaataggcggggtgtggtggctcatgcctgtaatctcaggactttgggaggctgaggtgggtggattacgaggtcaggagtttgcgaccagcctggccaatatggtaaaacctcgtctctactaaaaatacaaaaattagccgagtgtggtggtgtgcatctgtagtctcagctacttgggaggctgaggcagaagaattgcttgaacccgggaggtggaggttgcagtgagctgagattgtgccattgcactccagcctgggtgacagagtaagattccatctcaaaagaaaaaagaaaaaaaggacaaataactactcattgggggaaaggacagtcttttcaacaaatgatgccagaaaaactggatacccacataacagtgaagttggattcttactttacattgtattcaacaattaattcagagtggatcaaagacctaaatgtaagattgaaactataatattttactagaatacacatgggaaaagcttcatgacattggatttggcagtgatttcttggatatgacaccaaaatcacagacaacaaaagaaaaaaactagctaagttggacttcagcaaaatttaaaacttttgcacactgtcaacagaattctaaaaagggcaacccatggaaaggaataggagaaaataatattatctaataagagatgatatccagaatttaccattataacagttttttaaagtgcagtggcattggccaggtgcagtggctcacacctgtaatcccagcactttgggaggccaaggcaggcggatcacctgaggtcaggggtttggtaccagcctgaccaacatgcagaaaccccatctctactaaaaatacaaaaattagccaggtgtggtggtgcatacctgtaatcccagctacttgggaggctgaggcaggaaaatcgctgaaccaggaggcagaggtcgtggtgagccaatatcatgccattgcactccagcctgggcaacaagagtgaaactccgtctcaaaaaaaaaaaaaaaaagttcaatggcattaagtacatttacattggtgtacaaccatcaccaccatccatctccagaactttttcatcttccctaactgaaattttgtatctgttaaacactaactcctcattctcccctccccccaaccccttggcaaccaccattctgtctgtctctatgaatttgactacactagatacttaattttttttattgtttgtttttttggagacggagtcttgctctgtcgcccaggctggagtgcagtggtgcgatctaggcttgctgcagtatccacctgccgggttcaagcaattctcctgcctcagcctcctgagtagctgggactacaggcgcacgctgacactcctggctcattttttgtattttagtagagacggggtttcaccgtgttgtccaggctggtctcgaactcctgagctcaggcaatccacccgcctcagcctcccaaagtgctaggattacaggcgtgagccaccgcgcctggctactgggtacttaatattaagtagactcattcaatatttgtccgttgtaactggcttatttcactgagcatgatgtcctcaaggtttgcccgtgttgtagcatgtgtcagaatttcctttttaaggttgaataatacttcaccctatgtatatacccaattttgtttatccattcatccaattatgcacacttaggtcgcttccaccttttagttattgtgcataataatgctataaacatggatgtacaaataaatctgagttcctgctttcacttctttggagcatctatccagaaatagaattgtaaatcataatgattctgtctttaattttttgaaaaattgccatgccattttccagagcggtcgcaccattttgcattcccatcagcagtgcacaagggttccagtttctccacatcctcatcaacacttgttatttttctgtttttgataatagccatcctaatgggtgtgcagatgttgagctttattttatttattgattgattgagacaaggtctcactctgtcgcccaggctggagtacagtggcacaatcacagctccctgcagtcttgatctctgggactcaagcaatcctcccacctcatcctcctgagtagctgggactacaggagcgtgcctccctgccaggctaattttttaatttttggtagagacaaggtctccctatgttgcccaggctggtctcgaacccctgggctcaaacagttctgccgtctcagcctcccaaagtgctgggattacaggcatgagccaccatgcccgtcctattttatttatttatttgtaaagatgaggttttgctgtgttgcccaggctggtcttaaactcctggtctccagtgatcctcctgcctcagcctctgaaagtgctgggttggcagacatgagccaccatgtcagctactgttgaggttttaaagagagattataatgtgtttagggtaatgtttggttttcttgttagccagttgcccagtacactgtcagtttagaataatcagccagccagttgctcaattggtatagagcaaagtatggttgtttggctgctttatctctgaggtttttagaaaactccatttttggaaacttgaacaccacattgattgaagttacatattttaattgcatttacaatctttaattctcaatagtttaaaaagaaatatacataaggatgttcctaaaagcattgttcataatattggaaaatgaaaacagttcacgtgtccaaaaattatggggagggtgtgtatacatacatacataaatacatatccacatacagggcaatactcaaaccattaaaataatataagccaggtgcagtggcttatgcctataatcccacagcactttgggtggctgaagtgggaggattgcttgagcccaggaatttgggaccagcctaggcagcatagtaagatcctatctctacaaaaaattaaaaattagctgtgagtggtggcacacacttgtggtcccagccactcgggaggctaagataggaggatgacttgagcctgggaggttttgactgcagtgtgcaagaccctgtcttaaaaaaaaaaagaaattatacacgtttatttaccgccatgggaatatgttattacattgttgaattcaatagcacattaatgaacagcaaatatattataatctcatttatataaaattaagttcattagtctatattatatatattaatacatatatagataaataaatactttgaaagacattcactaaaatgttaatagtgcctctctttaaagtgacaggatcacagatgatttttactttcttcctaatttttgtatatttgaattttcttctgagcatgcattatttttctaaaaataataaaaccatgaaccacccaaaattctgaacaaaacaagcaggaaatacattctggtatttttttatttaaaggtttggcatcaagtttcctggcagaatacattccaggagaatatttcattgcaagaaagatatccttgaatgatagctcatgcaaagtctatttttatttaactatccatggaaggacttgtatgtaattcaccttcatcttctcttagctatactgtccaagaccaattgtggttagaaaaggctcttatatatggatattatctctaaaacattgggtgatcttagccctcgtttactccaaaaatttaagaatggaaaaatcccatttgtttaaatctgatcacagtttttctttttggatttcaggaaccaataaaatcacgtgctccacagcttcatttagagtacagattttataaacagcttggcagtgcaggtaagtcaagtcttttctctccacttacttagtatgtatcttagctggaagccctaaaatatacaaatttttttgtctggtttgccctttttaccaaaccatctatctcccctgcttgccggataggtaaataaacatagtcaaccacaaagctacttgcgctctggttcctggagttgagttgacaggggaactgtgttgctatgactatgcccacagaccaacctgcagatgccttccacttgtcaaatactcatagtgtgaaggatttgcttttcagcagttcattctcttttctttacttataccaaaagaaaggaggaaatgttggtaatttgcaaaatatactttaccatactgagatggtttatctgttttgaagacatactaaaatatacattctgaaatattacagaaccgtcattttatccattgtcctcattaatttgcaagagctatccatatgattgtaataacctatgaccttcggcaatttttaaaaattaagttaatcactgtaaaaaatgtttgtttttaccaaaaagctctaatttctcaaatatcttactggcttccagaaaaatgttttgctaatgtttacctgtagggacaagtctctcagaagatgaaatctttcagagctattttcactatttgacattagtagaatttcctctgctttatgcccccttcactgtgacaggttttatatgaatgactaaagcttggtttctattttttttttctttctttctttcttgttttggagacagggtctcactcccatcacccagactggagtgcagtggcacgatcacggctcactgcagcctgggccttctaggctcaagcagttctcctgcctcagcctcctgagtagctggtactgtaggcatgcaccaccacaccaggctaattttctgtatttttagtagagatggggttttgccatgttgcccaggctggtcttgaactcctgggctcaagtgatcctcctgccttcagcctcccaaaatgctgggattacaggcatgagccatcatactgtttgttctatttcaagtaaccctatgaaggtactactgaaggaatttgagttctgcatcctaaaatatttagaattatatgagtcattgtgtgttattcaagttttattataccctgactatagcaataatcagctatagttataacccagggagcccacaatggacttgtctttcattgaacttaatatgaattcttgctcacagtagcctctcagtatatatttgttaattgattggagtgtttttggcataagatttaagactggcaactgagttcacagggtgtatacataacttgaggcttatcttcccacatgccccaggactacattttaattgttgttcctcttacattcctggttttataatgttgttaagttattctaggtttcataagttttagggaaaagactgtcacagcccatttatgataagcatgtttgtatatgtctcataaatccaagggtcaggtaacaacatgcttaatccagtccagcttagaagtttaagtggggaagtggacaggccagttttcaggatttcctctgtaagccctttcaaatagatccaccaaatcagaccaatcttcccttttcaatatagagccaaaaaaaatctaatgtatttgttaggtaggaataacatctgtgctgctgggttggtactcttcccaaatacagaaaattgcaagctcttgaagtttcagcattctctgtgcactgaaagcgaggagtaaacagggagggcattagaggaaaggtgactatacaaattgcttttcacttaagcagcaaggaaaaactggaatctctgagactggtatatccatcattgtcatgagtgggaataggagggctctgttgtactggttaggccaactgttgactcatagtcaggtaggctggccatcgttggtctgtctcccagtaccttttctaacaaacatgtaaaggtcacaaagccttctaggtcctatatgcagttcagtggtgactactggcctcttttctgcttcttgagatcacccactacttctaaaatagctgcggtgggcatcatcttaatacccttgcctgcaactaacaaggtagctgcagacttttccaagataggaagtgctttagttttctgtttcaaatccccttgctacccctacccgctagtgtaagaattacttttaggattttcttacagtcatctaaatcggcttgactacttagttctaatcatagagttcaccactcttcaggctaatttaatgtgggaaagtccagtgtatttgaagttcttcatattaggcccaagtttgccatttatttatatatttattatttttaaaatttagatggagtcttgctatgtcaccaggctggagtgcagtggcactatctcggctcactgcaacttccgcttcccgggttcacgccattctcctcctcagcctcccgagtagctgggcctacaggcgcccgccaccatgcccagctagtttttttttgtaattttaatagagacggggtttcaccatgttagccaggatggtctcgatctcctgacctcgtgatccgcctgcctcggcctcccaaagtgctgggattacaggcgtgagccaccacgcctggccaattttttgtatttttttagtagagacggggtttcaccatgttggccaggatggtcttgatctcctgacctcgtgatctgcctgcctcgccctctctaagtgctgggattacagatgtgagccgccgtgcctggccatattttttattttattttttccagagtccagatgaggaagaacattgggatatttttaaaatcctgattatattatcctattgatgattaggcattgactatttttttattgtaattgcatattggtcccactctccccactccctgccataagattataagctccttgaaaacaagccttgtgtcttctttacccttgtatctcaagcgtatcttaaggcctggtgtgatgtcattctgtcacatagcagtcagcaagtagttcagtggcagaaagaagttagaaagatttaataagcttgcctttttagatttttaccaatgttattaataaaaatattccttgtgatggttaaaaaaaggaaatttattttgaaagaagatcaattgacaagaaaatagacaagatttcaccatgtgtccttgtaaatgtgagcatgaacaccagagcttgtttttaacttagaggcacagcattcctccccctattttttcagagtaagttctcagctgcaagtatgactcattggtagttaatgtttgagcagccagtgcgcatatgccactcttttgattaccaaggtgatgttgcagcattgtaaataaacaaccttttgtgccaaagccacacaaagaccacagtaacataattagtgtttttactcactagtgttttgtctgtcattgttcattactgtccagtgaattataaaatatttggatttcctgacaatgaatacttaaacaaaaagcccattgtgacttaggtttgttcagtgaattaatcattgcttataaatgtatgaaattatttgggaaaaatgattgattatgaatttaaagaatacctattgctgtgatatccagagcttgagacattaaattcctaaaataggaactttttgttgtcctgggactatgaccattttcttcagtacccaactcttaatcattaccttggccttttggaccccagtttcacattgatgacctgatctagaaattcataccaattctctaattatgtagagatagaacaaaaatgacagcactgggtaattgtgaatgtggttctggttggaggtcttccacattgtctctgcttttccttgtgtgatctctaactctttctcttccattccactttgttttctagtgagtggtcacacttttcaagctttgtttcttgattacagttttaccaccaagattttcaagacttaatgcttaagaattgatatctccaagataatcagggaagaaagtaaaggggaccatgagaaccttgaaactgagaataagcattttattttcctgttagctatcattttttcatttcttatagaaaccaaattgtaaaatcttataactatttttcttattttcttcaatcatcaatgttatgttaattgtattatggtcaccataggcaagttttaatttcttttctttttatgggaatgattttaggtttcagtatttccttagggtcttttacttaggaagatacatacattatcaatttaaaaattttccaatccataaatcttttttccagcatagctctcagttttgcttgtattctagcacacaggaacaagatttggtggatgagaggtttggggcagagatatgaaagagtctgtggccgaaacagatccgtattaggaagagtgacagtatgagaatgactccatagctgaccacatgacaacagcgtggtatatgttcgttaattgactagaagatgaataagccagaaccaagcatgcagctgaagtgggaggaaaaagggagggaggggatgagtcagcaaggaccagagcaaatgaaagaggattgagggtttagagggtaggtaaacggcaggataataggattctttgcagtaaatgacaggaaaatggaggtctctgacataacctgaaatttctaagtctaggctcccatatcctggcttcccagcagctattgtaatctagtgactcttctgatttggctctcttataaaggagaagctaatcctcaaattaaaaaatgacaagattcctcccccccccccttttttttttttttaaagagacggactcttgctctgattctgaggctagagtgtagtggtgcaatcgtagcttgctgcagcctcaaattctttggctctagtcatcctcccgcctcagcctcccaagtagctgggactacaggcgcaatgcaccatagctggctaatatttttagttttttgtagggatggagtctcactatgttgaccaggctggtcttgaactcttggccccaggtgatcctctcaccttggctgcccaaagtgctgggatcacaggcatgaaccactgtgtccagccttaacaagaccccagttgaaacttcacaaatgcagtagtcaaaacaaaatctcattgggcagagaaagccagttaacttgttaaatacctagtaggcggttcatttttaaaattgatacataatatacctatttatgggatatatgtgatattttgatacatgcatatctatgtgtaattatcaagtcagggtggttaagctactcattacctcaaacatttaccatttctttgtgttgggaacatttcaaatctactcttctggctattttgaaatatacaataaattattgttaactatagtcactctgctgtgctatcaacactagaatttattgcttctaactgtatgtttgtacccattaaccaagctctcttcatcctccccacacccaaccattcccagcctctggtaaccatcattctatatgagatcaactttttaagttttcacatgagcgagaacatgtgatatttgtctttccctgcctaccttatttcagttattataaaggcctccagttccatctgtgttgctgcaaatgacagaatttcattctttttttgtgtgtgtgtcttttttttttttcctttttgtggagaaccggggtctcgctatactgcccagtcaggtctcaaactcctgggctcaaactatcctcccacctcgcctctctgagagctgggcttacaggtgtgaatttcattcttttttatgggtgaatagtatttccttgtgtgtatatgtaccacatttttttgtcctttatctgttaatggacacttaggttaattgcatatctttgctattatgaatagagctgtaataaacatggacgtacacacatgtttttgataaactgattttgataatggctgtgaagatcatttgcccatttttaaatcagattattatttttactattttttgctattgagttgtttgaattgcatatatatcctggctattaattaatcccttattagatacatggtttgcatatattatattttctcttattctactggttgtctcttcactcagttgtttcctttgctgtgcaggagcttcttagcttgctgaaattccatttgtttatttttgcttctgttgcctgtgtttttgaggtcttacctgaaagattttgcccagaccaatgtcatgaagcatttccccaatgttttattctagtagtttcatagtttcaggtcttacatctaagtctttaatccattttgatttgtttttttttgtatagttagagataggggtctagtttcatttctctaaacagaccatcctttccctactgaatgttcttggcacctttgttgaaaattagctggttccaaatatgtgggtttatttctgggttctctcctctcttcccttggtctctttgtctgtttatgccagtaacatgctgtttggttactgtagctttgtagtatattttgacatcaggtagtgcgtgattagtgggtgatgcctccagctgtgttgtttttttttccccgccttgatacagggtcttactctgttacccaggctgtagtgcagtgatgtgatcacggctcactacagcctcagcctccctcaccacgccctgctaattttttgtagaggtggggttttgccatgttacacaggcaggcatcaaactcctggactccagtgatccacctgcctcagcctcccaaagtgctgggattacaggtgtgagccattatgcctggccttgctttgttctttttgctcaggattgctttggctattcagagtcttctgtgatttcataagaattttaggattgttttttctatttctgtgaagaatgtcttaggtattttgatatggattgtgttgaagctatagattgcttttggtattattaatatttttacaatattcttccaatctatgaacaagggatgtctccccccggcccacactcttttttttttttttttttaatttttcagtttccttcaccagtgttttacagtttcccttgtagagctctttcatatccttggttgaatttattcctaggtattttttttgtagctattgtaaatggaattactttcttgatttttttccactagtttgttattgggatgtagagatgctactaatttatttatttcttattttatttttattttttgagacagagtctcgctctgtcgcccaggctggagtgcagtggcgtgatctcggctcactgcaacctctgcctcccagattcaagcaattctcctgcctcagcctcccaagtagctgggattacaggtgcccaccaccacacccagctagtttttgtatttttagtagagacggggtttcaccatgttggccaggctgttctcgaagtcctgacctcaggtgatccacctgcctaggcctcccaaagtgctgggattgcaggtgtgagccaccatgcccggcctgtttatttatttttttgaaacaggttctcactcagtcacccaggctggagtgcagtggtgtgatctcggctcactgcaacctccacttctcaggctcaagtgatcctcctgcctcagcctcctgagtagatgggactacaggcacatggctagtaatttttgcatgttgcttttgtatcttgcaacttgactacatttttaaattcattttgagaatttttttggtggcagttttaggattttccacatatacaatcatgtcacttgcatatagggacaattcgacttcctccttttcaatttggatgccctttatgtctttttcttgcctgtttgctctggatagtacttctagtactatgttgaattagagtggtgagagacggcatcctgtcttgttccaattttttgaggagaaattcagcttttccctgtttaaaatgatgttagctgtatttgtcctatatgacctttgttacattgaggtatgttccttctgtacctagtttgttgagggttttttttgttttgttttgttttgtttttctttgagatggagtctcgctctgtctcccaagctagagtgcagtggcgcaatcttggctcactgcaacctctgcctccctggttcaagcgattctcctgcctcagccttccgagtagctgggattacaggttcacgccaccacacctagctaatttttgtatttttagtagagacagggtatcaccatgttggccaggatagtctcgatctcttgacctcatgatccgccctcctcaaagcctcccaaagtgcttggattacaggcgagagccaccgcgcccagccgaggatttttttttaatcatgaagggatgttgaattttatcaaatgccttttctgtgtctattgagatgatcatacggttttgtccattctattcatgagatatatctcatatattaatttatgtatgttgaatcattcttgcatccctggaataaatcccacttgatcatggtgaattatcttttttatacattgttggatttggtttgctagtattttgttaagaatttttgcatctatgttcatgaggaatattgctatgtagttttcttttgttgttgtgtcctggtctggttttggcatcagggtaatcctggactcagaatgagtttggaagaattttctcctcttcacttttctaatgttttagaagaatttatattagttattgatataaatctggttgaattcagtagtgaagccgtattaggccattcttgcattgctatgaggaaatacctgagactgtataaattataaagaaaagaggtttaattggctcatggttctgcaggctgcacaggaagtgtggcaccaggcatctgcttggcttctgatgaggcttcagaaagcttacagtcatagcagaaggcaaagtggggactggtacatcacaatacaaaagtaggaagaagagtgactgggagtcgggggaaagtgggggaaaaaatgaccagatctaatgagaagtcacttaccatgaagacagcaccgccatgattcaaacacctcccaccaagccccacctccagcattggagattacaattccacatgaaatttgagcagggacaaatatttgaactatatcagaagccatcaggttctggcctttcctttgatggaataagttactgcttcagtcttatcactcataattagttcaggttgtgtttttcatggttcagttttggttggtggtatatgtccaggaatttatccatttccattaggtttttcagtttgttagcatatagttgttcatagtagtctctaatgattctttgtatttctgtggtatcagttgtaatgtctcctttttcgtttctgattttatttatttgagtcttctcatttttttcttggttagtctagctaatggtttgttggttttgtctatctttttttttaaaaaaacaactttttgtttcattgatcttttgcaacttttggtcttaattttgttgatttctgctctttattatttctctccttctactgaatttagacttgttttttttttcttttctagtttcttgatatgcatcattaggttgtttatttgaaatctctacttttttgatgtgtttattgctgtacaccatcttgatttctttattgacactatagttattcaggagcatgttgttgaatttccatgtatttatacagtttctaaagttcctcttgttattgatctctggttttatttccttatggtcagaaaagatatttgttataccatttattttaaattttttgaaatttgttttgaggcctaacacatggcctgtcctggataatattccatatgctgatgaaaagtatatactctgaagctgttggatgaaatgttttgtaaatgtctgttaggtctatttggtctaaagtgatgtttaaatccaatgggatgttgaagcccccaacaattatcgtactggaatctatctttcccattagatccaataatattttatctttctgagtgctctgacattgagcacacatatatttacaattggttatatcctattgctggattgttctctttaacattgtataattaccttctttgttgctttttacagctttgacttaagatcttttgatatatctactcctccttgcttttggtttccatttgtgtagaatatctttttccatcccttcatttttagtctgtatatatctttataggtgaagtgagtttcttgtaggcagtatatagttgggtcatcgttttttatcagttcatccagtctgcatcttgtaagtgggagaatataatcggtttatattcaaggctatttttcacaggtgaggaattactcctctcattttgttaatctttttctggttgctttatatattctttattcctctcttactgttaatcatcgcaacttggtggttttctgtagtgatacggtttgattctttttctttttctctttctcctttgtgtatctgctttatcagtgagttttatagatttacgtatttttatgatggtaattatcatcttttgacctccagatgcaggattctcttgagcatttcttgtaagtccagtctagtagtgacagattccttcagtttttgcttgtctgggaaagactttattgctctctcatttctgaaggatagctttgctatatgtagtatttttggctgagagttttttttttctttccattactttgcacatatcatttcattctctcctggcctgtaaggtttccactgagaaatctgctgttactcccttataattttcttgactcttttttcttgctgtttttagagtactctctttgtgtttgacttttcacaatttaggactgtaatataaagtggacctttttgggttaaatatatttgggaacctttgagctccctggacctggatgttcatatctctccttagacatgaaaaattttcagttgttatttcattaaataggttttctatgccttttttcatctcttcttctagaaatcatataatatgcatgtttgttcacttaatggtgtcccataagtcttgtaagctttcttcactctttttcattatttttgttttgttttgtttagtttgttgagacggagtcttactctgtcacccaggttggggtgcagtggcacaatcttagctcactgcagtctctgcctccggggttccagctattctcctgcctcagcctcccgcgtagctgggattacaggcatacaccactatgcctggctaatttttgtatgtttagtagagacaaggttttaccatgttagccaggctggtcttgaactcctgacctcaagtgatccacccgcctcagcctcccagagtgctaggattacaggcatgaaacattgctcccgccttattttgttttgttctgttaactgagtagtttcaaatgacctctcatcaagctcagagactttcttctgcttacgtctgctgttgaatttctgttgtactttttatttaattcattgaattcttcatctgtgggaaatctgtttggttcttttctatatctatctcttagttgaatttctagtttatatcatgaattatttgtctggttttgttgacttacttgtctgtattttctggtatctcattaagtttccttaagattattattttaggtcaggcatgggtgacttacacctgtaatcccatcacttttggaggccaaggcaagtggatcgatggagctcaggagtttgagatcagcctagggaacatagcaagaccccatctctatgaaaaagacaaaaataattagccaggtgtggtggtacgcacctatagtcccagctacttgtggggctgaggcaggaggattgcttgagcccaggaagttgaggttgcagtgagccatgtttgtgccactgcactccagcctgagtgacagagtgagatcctgtctcaaaacaaaaacaaaaacaaagaaaaaaaacatacaacaacaacaacaaaagatcattatttggagttccttttccagcagttttaaaatttcttttcattggggtctattactaaagagttatgcttctttggtggtgtcatattttcttgctttttcatgtttctgtaccactgtgttgatgtttgtgcatctaatggaactgttgactctcttaaactttctagagtggctttgatagacaaagactttcacctgcagttgggtcttagtgtgccggttgggaagagtgtgatgaatctgtgtgcaggtaggtttagtgatacagcctctgtgcaacttctttggctacattaaacatcaggaataaatgtggatgccttagtggcctagggtatagagttttttggtagtgatggcagaaggttgttaatatccttgttggaaaagacttttgggtcctcctgttctcattttccccacaatggggagactcttggtatctgacatagcctacaagcagccgtgagactaggatcctaggctcagggtcttgaggtacctttagcagcccagatccagggggttgggttccagctgtgaatctctatccctgggggggcatggcacagccctggcccaactccagggaaaaaatgggtgctctggaggtttgaattcagaatacacgccatagctgtaattcaggagcccaagtcagtagggctcagtctaataggcactttatgtggttgtttctttttttcccatttttgagcacaggaacttcagtaacttacctaaagtcacacagtaagcaaacctgcactaggaatgtgggttttttttcatatatatatatatatatatatatatttttttttttttttttttttttttaagggacagggtcttgctctgtcacccaggctggagtgtagtggcgtgatcatagcttactgcagcctcaaactcctgggctcaagagatcctctcacttcagcctcccaagtagagtagctgggaatacaggtgcacactaccatgcctggctaattttttattttttatagagatgggatcttgctttgttgcccaggctgcatgtttttgtacagattttttttatgtgcgtatatacctataaacccagcagattcctagagccatccacacattatcccttacctaattttaaaacagtggcagaagacagtcataaaagcttttaactggggcaaagattggaaatttcccccagtgaaagagcaagatttcctgtttcacatgatgccccctaattttgtgactcagaaggctgccttcgttacttccaaaaccttttatggccttgagttttttaggttttgaaatttttttcccacagtaaatcaatcattgatgttgaatgcatgtgccatgtatacaactgagaagcttagtgctcctgtattcaaactgtttcacccactgaaacctttgtggtgtgaataaagtaagtgttaatagaggttatcaggctttgcaatttcgaagtcgcttggagggaatggttttatatgccctcataaaagataagcagtgctggttggtaccacaaaagagctttgaatctaggcaactgtaaattaacaggagcatggttctgtttcaatagagcaattaactatagatctgaagaagtcataagaaagtgtaatattgataagacccttttataatgttgtgaacatccttaggagtacattataaataagctgagcaacacaggaaacagaatacaagaattcaagaatacaaacttctgaagatatactagaaaaaatgggaattttacttaaagaggactcttttaacacaggtagttgtgaacaaagaacatgcctgaacttagttgtcctctaggagtgcttagggaacttagaagaaaccttttgatcttcatttgggtagaaaatttacataacctgggaagaaaggatgaaatagtgaacctggtaaaagaaagtaaaatttggatcttttcttgccatgtataaatttttcaggtctctctgccagaggtattacctatactcctaaattcagggaaaagttattttgtcttcctgtttcatttgtacaaattttgaggatacctgtgcaattttgttatatacatagattgcatagtggtcaagtcagggtttgtagggtattcatcacccaaataacatacattgtgtacctaccaaccaatttctcatcttccttccccctcccactccctcaccattccaaatttctattctctataattccactctcaacattcatgtaaacctattttttagcacttatgaatgatatcatacagtatttgtctttctgtgcctggtttgttttaacttaggttccatacttgttgctgcaaatgacaggatctcacactttttgtggctaaatattactctattatgtatgtataccacattttctttattgattcatccattgatggacacttaggttaattccatatctttgctgttgtgcatagtcctgtgaaaaatacatgagtacagatatctttttgatatattgatttcttttcctttgagtagatacccagtactgggattgctagatccaatagtagttctatttttagttctttgggaaatctccatattgtcttccatagagactgtactaatttacattcccaccaacagtgtaaaagagttccctttctctgcatccttgctaacatctgttattttcttaatttaatagtagccgttctgactgcagtaagatgatatgccattgtggttttgatttgcatttctttaatgagtactaatgttgaacattttttaataacctcttggccatgtgtgtcttcttttgaaaaatgtctattaatgttcttttcccacttttaaattggattatttgcggtgggttttgttgtttgagttccttgtatattctggttattagtcccctgtcagatgaatagttgcagttattttctcccattcaacaggttatctcctctccctgttgattatttcttttgctgtgcaaaagtatgaatggatagccttgcaattacattttgaggactgaagatttagacattgtcatctccaattctagatagtgtgaataagtggagatagccatgaattgaagtgagaaaaagtttagctcaacttttcctcactattttcttttcttttcttttctttttttttttttttttttgagatggagtctcactctgtcgcccaggctggggtgtggtggcacaatctcagctcactgccatctctgcctcccaggttcaagcgattctcctgcctcagcctcccgagtagttgttattacaggcatgtgccaccacacccaggctaattttgttgacgttacatatttccaggaccatgttagctgtttacctaacagttttctacctgttatgttccctatggatagagtctgtaccttatttatcttttttctctttcttcccttaaccgtctagtgtagtatcttgtacatagtaagtatttaagaaatgtttgaaatacagaaaataaatatatacaatacaaatgagttcagtgtttgaatctttctcagtcacctcggagttgcacaatcattgccaaatatgttctcattaacacagtccttaagttactatccactcaggagtttaacttctaccttgcggggaagataatccagaaccccctttcctttacccaaaaactttttgtgggtttttagacttttagactctttctgcttctgctatatttatacggaacagatttaagctacatatattttgttgatttataaagcccaatgaggtttttttcgttttcagtgtctttggaaatactgaggcatcactctggtttgccatgatttctcagacacccactttggggctgaaatttcattttactgatacatgtgttaaattgccatcaaacattttgtcatctcatgtttgggtgcttttccagttatctattgtgtgaaacaagccaataaaaaatgttggtttaagaggaggtagagcagctatatatgttcttagtcaacactgttttgattgcaaataacagcatctatttaaattagcttaaactcaaaaggaagatttactggaagaccagcaggatatgtcatgaaaccaagataggaaatatacaggcctatctagggattagaacaaaacacttggataattcctaggaaccaagacaactactcttggtccctggctttcttttcaactcttcttgtctctgacactttttttgaccctcctcctgcttagggctgtaaaatctcttgcctcagcttgcgtctaccagtatcattttgtctacattaccagccttctctgcttcttgtattttgtgggaaaaggcctcctgcatagcccttctcctcaatttaagccctagcagagattgagtagagcccttatgtcacaactgcacattcctaagaagaagattggctgacccatcttgggtcagcttttcaatcctggtccaggtagcttacttgtgggtacagaaccacatgggcccaccactcaagagagagcagattctctaagaatgaggtttaagagctgggagaaaaaaaatgacaatataacaaggaaatggagagcttacagaccatgcttttctttctcttctagtaacacttgctaaatagcaagccattttgccttgagacattttaacatcttgagattgttaaagtagggagtagaaactgagagctagtgtgtggtcctggcatagggcagtgagtacccccagaaacagaactacacctttcacaatgtattgtactcaccacctcttgtgggaaaataatcattttggagaaaaacctgctttgagcctctgttaagtgaggtagctcatctcatactttgagggggtctggaatgatgagttgaggtttaaagcaacatctgcctaacttttatgctctcaggacctgctcctgtgtgagtggcctatttgaaataagtaaatattagggcaacagcaacctaattttattttatattttattttttataatattttatatttattttaacagcctcatgttaaaaacaaaaagttgcaatcccgttcactgggtaaagggtgaggggggtgtttgaaaatatctgagcagcactaatgtcacagttgttcctcttagggagcagaacttaaatataaaagtgtgcctgatttggtgagttagtagcaagaacctgatcagtatatgaaaaccagctctatcttatggaacaaatgtcagatgaggaaaagtgtggtgtggtcatcttttcatttgagagaggaagcgggagggagagagagatttcaaatctacctgcattgtcaggaaacattttaaaaggatatttaaatgtttccattgatgttgtagcttaagtccagtgtgtggcaaatgcttaattttgtgaagaaaaaaataggaagagttgtttcatttattggacttggaaaggtataattcacatactcagtactaataatttctagtcttaaatggagcttaaatagtgatactatgaatttccatctcttcttccaagggtgaaatatcaggacctcagcctttagctatactagtttgcaaaaaacaaaaacaaaatcctgatatttctgaggcccgacttctggaccaggacgaattttccagttgtgtgtcctttgtaatttccgtaaagttttaggacatttctgatactgtggctaacagtgtaccctactgcgtgatgaaatataagcaagagatattcatatataatgctgtaagagacttgcttatcttttagggccagacctcctgtggtccttccctgcctctttaaattctcaaatagctctaaatcacctgagccacatagagtaattgcctttaattacatttataaaattttagagaattttgcactggggaaaggaaaatgtaaaaaaaagagagaaagagagagagagagaatctgtccttttccctcctgcaaaagaaaaacatttctattttacacattttggaccagtaatttccttaattgcaaatagactgttgtgagtttattataaaaattgtttggccttcatacatcccacagtaacacaaagtactgacaccttttcagcgcatcattttgcaaagtgcagaactgcttgaggttatttgctcagtgtgaaggtagaatttgctacttagattttgttttcttttaaagggcttcatgaaaaatagaaggtaaggttctagaaatacacccatgtaacttacatataagtgaactggactgaagagttgtgattagttataggaaatcaatatagtgcttatgcaggcagaggtttcaaaaaggtggatcaccaaaacctgtcagtgggagcttgcttggaaatagacacagaccctgaaggttctggtgctattttctccctttaattctatgtcatattttgacctttttttggtctttactcgtatttctcttactgtatacctgtatgtttctcttccatccgtattctcacagccatttctctggcattgagtagagcttttagtggctgccgttagagaatgcttgtttaaggaggtcaaagacaagggaagtctcagtctaaaataaggactagaagtaagctcagtgaccctcaaaggactgaccacagcccttagtcactcttcttcctagctcatagtatgtcaaggttaatcatttagaagggaggtaacatttagcattcccaaagctgtggagtactatggaatgaagaaggtgagtcattgaagagaattattcctatgattatgagaaggcagaattatgtatctactgtattatattaaaacttaactagttcctttccagtatctgtcagtgtcattggtaagaaaacatttccttaagttccagtaacaaactatttaaagatagataactccttgtgcctactatcataatagtaatctagctgctagctaagcccttttctatttgagaatataagttatttgtaagtgtgcttggaacaaaaaccaataaaaagatcaatttttaacatttgtgacaattatattgtcattttctttctacaaaagtaatttatattccatccattaaaagaagagtttgtcagatctgcacgattctgcattcttgtgctttcagcagtctaacacacttttaacatttttctgcattttcttttctttatacttcatattgccttaaagccagcctgtaggtaatctcttctacattagtgataatgcaaggagatgaagttttcactaacaaaacactacacatcactgtgtttatagctaccactatgctgggtaatttgagggccaaagaattataaataagatgatctctgcccttcagtacactagagtgtcattggaaggaaaatgtaatatttactgagcttacagtatgttcatgttaggacagtgaggttaatggtaggacaataatggtaagtaactgtaacacaagctaaaacagtagaatgttatatatatttttaaaatgcatataaaatgaggaagttctgaaagaaaaaatggtttctaattttgagaaagagaaaaggttttatagagagagtggcatgtatggggctgagctttaaaaaacgactatgatttatttgaacatataaaaatggaagagtaaggaaagctttccaagtacaaaaaataaaccaagtcccagaggctgctatgtctctgttcatgcatttattaaagagatattcttgagcatcccacttgggttaagtactattctaagctaagtcttagggatacagtagtgaacaagataggcacagcacctaatatatatatgtatatgtgtgtgtgtatatatatatatatcctaatatatatatacatatacatatatgagcaagacctcatctccaaatatatatatgtttatataaatataaaatataaatatatatataatatatatatatttggagatgaggttttgctctgtcacctaggctgaagtgcagtggtgtcatcacagctcactgcagcctcaacctcctgggctcaagagattctcctaccccagcttcctgagtagctgggaccacaggcatacatcacacgctcaactaatttttttattttttgtaaacatggggtctccctatattgcccaggctagtctcgaacttttggcctcaagcaatcctcctgcctcagcctcccaaagtgctgagattacaggtgtgagccaccatgcccaggcttaattaatgttctaaaaggaatataacctgcaattttattttattttattatttatttatttatttttttgagacggattctcgctctgtcacccaggctggagtgcagtggcacaatctcggctcactgcaacctctgcctcctgggttcatgccattctcctgcctcagcctcctgagtagttgggactacagtcacccaccaccacgcctggctaatttttttgtattttttagtagagacggggtttcaccgtgttagccaggatggtctcaatcttctgacctagtgatccacccaccttggcctcccaaagtggtgggattacaggcgtgagccactgcacccggctgccattttatttttaaataccctcacagacctgagtactcaagtaatggggactgtcgtgctaaatgttgaaaataggcccaagcctagagtcagaatagggaccaaagaagatttagaactctggcagtttgggaaggatgaggtgggagaactgctcgagcccaggacttcaggaccaacctgggcaacctagtgggaccctgtctcaacaaaaaattaaaaattagccaggcgtggtgtcacacgtctgtaagtcccagccactcgggaggctgaggtgggaatattgcttgagcctgggaagtcaaggctgcagtgagccatggtttgtgccactgcactatagcctgggtgatagagtgagaccctgacttaaaaaaaaaaaaccaaaactggcaatttggcactatatactaaaatattaactatgcaagcatttgactcagcatttcctgtttaaggaattaacattcaagatatgtttaccgggcagggcatggtggctcacgcctataatccaagcactttgggaggcccagcgcgtcaggtgatctgcctggccaacatggtaaaaccctgtctctactaaaaatataaaaattagccgggcacggtggcgcatgcttgtaatcccagctactccagaggctgagacaggagaatcccttgaacccgggaggtggaagttacagtgagccgaggtcgcgccactgccctccagcctgggcgacagagtgagattctgtcttaaaaaaaaaaaaaaaaaaaaaaaaaaaaaaaaaaaaatttacaaacatgcccaaaaatataggcttaaggatttttttttgtagtattgcatgcctatttgtctagatgcttttatttgccaagagtagaatcccagttcaagctcacttgagagagggagaggagaatttcttggctcacagaactgagaagtcaaaagcattctcacttcaagccatccagatacaggactaataatgtccttggtccataggtatgtgatacatttgcctctctttttttctcacctcttctttctctgcattagcttcattctcaaataggctttctccatgtggtggtccctggcaactccaggctgagctgctttcagtttagcgatcagggagagagagagagagagagagagaaagagagagagaaagagagagaatactcctccttctctatagttccacaaaagtcctagagttgactcttgttacatgagagacatggcacccattcctgagccagttttcccaggcaggcagatagagtattctgagtaattgggcttgtggcatcctcgggatgtcagtgggagatgggttgcccccactttaaccacatgaagtaacactggggaaatggtactttccactgtaagaataaggtggtgttatcagaaggaacaaaaggatgcagaccaggcaaaagcaataggtgttcactataatatatatttctaattaacacatggaaacagcatgaatgcccatcagtagggggaaagttaaacagatatgttacatggtggaatactattatactactattaatatgtagctattaaaatgaataaggtaggtctatatgttgataagaaaaaatatccactctgtagtatttttctttttcttttttttttttttttttttgagacagagtctcactctgtcgcccaggctggtgtacagcggtatgatctcagcttactgccaactgctgcctctgaagctcaagtgatcctcttgtctcagcctcccaagtagctgggaccacaaacacacaccaccacacctggctaattttttgtagttgtggtagagacaggggtttcaccatgttgcccaggctggtgttgaacttctgagcacaagcaatccacctgccttggcctcccagactgttcggattatgggcgtgagccaccatgtctggcccatgctatagtattaaattaaaaatgaagttgcagtacactgttcttaatcatgtgcctttgtggttgtgaatactttttctttttcttttctttttttgagacggagtcttgctgtgttgccaggctggagtacagtggcatgatcttggctcactgcaacctccgcctctggggttcaagtgattcccctgcctcagcctccccagtagctgggaatacaggcgtgcgccaccacgcccagctaattctttgtattttagtgagacggggtttcaccaggatggtctggagctcctgacctcgtgatccacctgcctcggcctctcacagtgctgggattacaggcgtgagccaccgtgcccgggtgtgaataccttttctttatatgctttttactgcttttggtttgctgttatgtttggttgtctaaaaatgggtaatatagatatccatgctatatctgtctgtttatcacttttataatttaaaaaagtaatgccccaggtggttcctgttcaagaccagggactggaattgacaaggcttgagaaccacagagaggtggacaggaaaggtgaaaagatagtgtttgtggagctgattttaaaataatgggggagagggcaagaaaatttcttaaaaattaaaaataagggaagccaaaagggtgagtaggacaaatcaagctgcctgtggagcatagtgggggatttatgtactggaaaggtgataaagaattggtggaaaaagaaaatgttaaccaaaagggcaggacatagggtttggaagagttgggttggggagcatggagaataattttggcaacaacacagatgaaaaagaacattgagagtaagagaatgtaggcagcttagtgtagagaagagaacagtgaatctggaattgagagatttggttgtattatttgggaacctaggagatttcacacaatatttctcagggtttttatttcatctgtaaaatggggtctttagtacttcccctgtttttccttacaggatgaccatgagattcaagtgtggtaggaaaagactacttaggtgaagaaaagaccgtgtatttccaagttaaatgggaccaaaataaagaatttgtttataaattgagagggagaagataagggtaggaagaagttactggacttcctttcatattagatgatttagatgtctcatttttttggtcatttaatctgtttggatgggcaggtgctgttttgagagaggagaagacatttgtttgtgtgtagttttcagtgctgttaactgaaataagtaattctgcatagttgtttacctacatatgggaacagcaagataaactgtagatatcatttacaatcatcatggaagatttaaaatacacagaagtcaatgtagaaatattgcaactctgaatttacttggagtattcatacttgtggcttgcccagcagaactgtcttttaaaagtattcccatgaaatgtaagcaagaactcagaaaaatcaattgtgttagtattcgtgcacattttaaatccactgaatttgctttgctctgtatgtattgtgtgtatttcagcattttgaggaaagcattaggcattccaaatggaaaactcaagtgccatcgcactgagttgtagttattaatttacttagtacttattttaaccatatctaccatatgcttggaccagtgctaggtgctgacatacaaaaaattaacacacagtagttgctgtcttcaaatagccttctgttagtagggaagacagacacatggataaagaaagtgtaatgggactggggcacgattgtcaggaaggggatcactgtactttgggtaacctcattttttccttttcattccttctagctgcttgctagaaccttcttgactttttagttgttaattgttcaggtggattttaagaagaatcaggtgtattttcttaggttttgaggcagattttgaaattcagtagataatccatctttttatcttaaatcacaggaactacagtactaaggaaggtggaaaaatgtcaaatactggattttttaatctcatgaatttaccatctgagtaaagttagtctgttagtaactgagctgagctgagttagtctccttttttttttttggtttgtttgtttgtttgtttgtttgttttgagacggaatcttgctctgtcactgggctggagtacagtgttgcgatcttggctcactgcagcctccacctcttgggttcaagcgattcccctgcctcagcctccctagtctgggactacaggcgtgcaccaccacgcccagctaattttttgtattttagtagagacggggtttctccatgttgaccaagatggtcttgatctcctgacctcgtgatccatacaccttggcctcccaaagtgctgggattacaggcgtgagccaccacacccagccgagttagtctttttggaaagggaaaggactttactcctctgcccctacccacctccaatacacaacacacttttacctgtttttattttgggccaggcacagtggcttacgtgcccagcactttgggtggccaaggtgttaccagatggaaagtcttgactgtgagttgtccaagttcttggtgccttgagcaaagaattgaacaaaacgcacaaagcaatggaagacgaaggcatagatttgttgaagtgaaagtacactccacagagtgggagcgggcttgagcgggtggctcaagagccctgattgtaatgttccttggggtttttattgaattaaaagaatatggtaagccgggagcagtgtctcacgcctgtaatcccagcacttcgggaggccgaggcaggtggatcacctgaggtcaggagttcaagatcagcctggccaacatagcgaaaccccgactctactaaaaatataaaaatcagctggatgtggtgacaggcacccgtaatcccagttacttgggaggctgaggcaggagaatcagttgaacttgggaggcagaggttgcagtgagccgagatcacgccattgcactccagcctgggcgacacgagtgaaactctgttcaacaacaacaacaaaagatcatggtaacacatctaagtacctttaggggcttctgataggttatgccctatgtaaatgaaggattctgccctaggccaatcagaggcaggattctgtccaggaccagtcagaatcaagattctgcccaggaccaatcagaggcatctcacctatggcatatatgcagatgaaggtcccagaatggaccaaaaccagacattcccattcctgacataggggaggggaggttcggagagggatgggcctttggcctgttatgacttggttgtggacaggtggggttttcctcttagtccaattccaagaaggcagccataggttggccttaggtttactgtttccagaccctattctcctgcctcagaggcaggtggaccacttgaggccaggagtttgagaccagcctggctaacatggtgaaaccccagctctactaaaaatgcaaaaattagccaggcatggtggtgcatgcctgtaatcccagccactcgggtggctgaggcaagataatcgcttgaacccaggaggtagaggttgcagtgacccaaaattgcaccactgtactccagcctgggcaacagagcaagactctgtctccaaaaaaaaaaaaaaaaaaagaaaagtgtattttggattctatctactatagaagaaatctgtcctctgtcctgtcttgggctttcttttctgactccttttgggtaaataaaatgttaagcctgctttaaggctcaaggcattcataattatgtgtatgtaatagagacactgttaaagctcaatgtctgtggctcggaaatgtgaaattattcctcttcttttgcctttcctcactgcctcttcccccaccatacaaatttgagctcgtgttagcagcctatgtttggcagtattccagttcccaggaggcctttaaacaagatgattgtaaaacatttttcattacaggacagacaaagtaatcctgttttcttaattctgggcctagctgtttttgttattaaaccagcattttgagtaaattcatatgtttaactggttcatgttgcaaagagacatttttcagagtcagagacatgagagggattgtttgttcttttttaaaaaagatatactacgtattatctcatatctttgtaataatgcattgtttcatgggtttattctcagagttttaaaggctatgcttccatttttccctttcgttacttacaatggaataacatctcatttatctgcctatttctgatttcttgctaagggtacatgtttaatattattttctttaatgataattgcccatgtattataataataattgcctgatccctcagaaacattacagagcatttagtagttgtgctagaaactattactattgatggggctgagaagagaattaatttaatttgggagaaaaattattctattttctttaaacattaaaaaataaactatataaacaaagcaaaagaatgggcttgccaaggttgttgtccttcatagttaggtaatttagtttttaaaaaagaatgaaagactaattattaggcaataataggatcaaattaccaaaacctttgaggtggttctatttcagttctcaacctgatgtgcattttaaaatatctctacttagagtagttagggttcataatgtgttgtagattgtttttagataacagcttggatgataaaagaagccattttccttgaattggtgtatttgactcaagttaaacttcatacagactgaaaattagctctagtgttctacattcattgcctattctgtgcagcttgatgtacgtgtgagccatatgtctggcagggtttataacatcatgttattgatgatggaaaggctctttcatagtactaagaaaaatatacaagataacatatgtactgtatatgtaaccttgcagtttggtttataagagatttaacctgtagttaaaggaaatataatgaaatctattggaaatccttcagaaaagtaaaattcagtagtcacttctttagtttccaggtttctatgcagtttaccaatttaggaaggggagacctcattagcacattatttccagagcagatgagagattataaaactattaataccttagtttccaatataccattgatcaaagaatccagcacatatcttccttgcctgagtctcccacttcctttccattccctcataattatttatagaaagtacctgtttaccgcatgtgtaccttatgttgcacttaaggatctgcccttctccccagcctcattaaaggatttcatagcataatgttgattaatttaaaatttcttaagcagtggattagagatggctctgcaaaagaagaatgaaatatacaggattttttttttcatttaaatgcagcccagctgataagccgttactgtgtggtaatctctgaccaaagagacagactttcttagtgtgcttgtgtttgtgtcttttaccaccagcacagaccactttatgggcactcctgcgaaaaaccaggctcagagtagaacttgcatggggagctttctgtacagatagttctaataaattacagctacatctcccaaagaaacttttatgctcaaaggtatattttctgtaagaaaataactaagaaactttaaacagagaaatctttttaacttgccttaaaattctttccttcaaaaggtattgagtccagttgttttgatctgaaataacttctgaaagagacctgtcactgtattctgaatccttatattaatcataaaacaaagcaaaaccctttatttctactctctagatatagtgtttttcagctgaggttacacatcagaatcacttgtggagcaatgtttgcttccactcctagaaattctgactcagtaggtaggaggtgaagtcactgcatctcattttgggtttttttttttttttaagttttaaagatatttctgatagatacacttccagttgagtttcactaccagcttatatttgaattggtgccacacgttatttcataaaatatggaggtgagtttcattcatagttctgtggctttacaaagaggaacccagaaggtagctagaaggaaatcctggccataagaatttggattttgaaaggaaccagtctaaaccccctcctcttttttttttttttttttttttggtggtgttgttgttgttatttctttatttcttctaaggagaaaaaaaacgggatacatgtgcagaatgtgcaggtttgttacgtaggtacatgtgtgccatggtggtgtgctacacctattgacccgtcttctaagttccctcccccgaccccccatccaccaacaggccctggtgtgtgttgttcccctctctgtgtccatgtgttctcaatgttcaactcccacttatgagtgagaacatgtggtgtttggttttctgttcctgtgttagtttgctgaggatgatggcttccagcttcattcatgtccctgcaaaggacatgatcttgttcctttttatggctgcatagtattccatggtgtgtatgtaccatattttctttatccagtctatcattgatgggcatttgggttggttccatgtctttgctattgtaaatagtgctgcagtaaacatacatgtgcatgtgtctttatagtagaatgatttatattcctttgggtatatactcagtaatgggattgctgggtcaagtggtatttctggttctatatccttaaggaatcaccatactgtcttccacaatggttgaactaatttacattcctaccaacagtgtaaaagtgttcctatttctccatagcctctccagcatctgttgtttcctgactttttaataatcaccattctgactggcgtgagatggtatctcattgtgtaaaccccctcctctttacagatgaataagctaacccagagaggctaaggaatgtgccagagttgaaagcagaagcaaatactagatctaagactctgacttgagctttttctacactggtatctcggaccttgaccctctcctagaaatgcttcaaaaccactcagtggtctagaagttgctttgagcatcccaaagcctgccagtgtgttgtgaggtctcagggtacttaataaaaccaataatgcagcgagcaggaactcttaattcttccaagttcctaggtaggagtaatgggtgacattatagttagaaattgtagatattactcaaaatccttttgtgacttcattgtaaacatggaaacttctggcaaaagataatctagatttgatactaaggattattaagaacaagatcagttgtctcatttaaactgaaccttaagtattggcaacaagtgtaggaaattatgccaatattatatttctaagcaagcctgacttttagcttgtactttagaaagaggatattatgcccagatttgcaatttaaccaacgaatggagtaatatgtttattaattaggattagagttggctgctttttaaaaatccaaatacaagtagctcagtcaaggtggagattgatttttctttttgataaaaaaaatccagagagaagaaaagtccaacattagcatggttactccacagccatcagggacttaggttctgttttttgctccatctattcttggcactactttacatcgtcaagatgtctggtgattctagatggcttctggacctttcattctagccatctctcttgaaagaatttttttagaattatacactcagtggccaggcacggaggctcatgcctgtaatcccagcactttgggaggccaaggcaggcagatcacttgaggccaggagtttgagaccagcctggccaacatggtgaaatctcatctctaccaaaaacaaacaaaaaaaaaattagccatagtctgtagtcccagctactcaggaggctgaggcaagagtaaaactaaaaacaaaattagctgagtctgtagtcccagctactcaggaggctgaggcaagagaaaagcttgaacccaggaggcggaggttgcactgatctaagatcatgcaactgcactccagcctgggcagcagagcaagactctgaataaaaaaaaaaaaaagagttatacactcatttctgcttccatctcattggtctttcctaattgtcaagggagactggagttataactgggcaagttgctatttgcaacaattagaagttctgggccaggcatggtggctcatgcctataataccagcactttgggaggctgagttgggtggatcacttgaggtcaggagttcaagaccagcctgaccagcaagatgaagcttcgtctttactaaaaatacaaaaattatccaggcatggtggcaggtgcctgtaatctcagctactcaggaggctgaggcaggacaatggcttgaacccaagaggcggaggttgcagtgagctgagaccacgccactgcattccggcctgagcaacagagcaagactctgtctcaaaaaaaaaaaaaaaagttatgttattttaaaagaaggggaggctgggcgtggtggctcacacctgtaatgccagcactttgagaggccaaggcaggcagatcacgaggtcaggagatcgagactatcctggccaacatggcgaaatcccatctctactaaaaatttaaaaattagctaggtgtggtggtacgtgcctgtaatcccagctacttgggaggccgaggcacgagaatcacttgaactcaggaggtggaggttgcattgagctgagatcgtgccactgcactccagcctggcaacagagcgagactctgtctcaaaaaaaaaaaaaaagaaaagaaaagaaaaagaaaaaaagaaggggagaggcatccctgtaatcttagcacttgggaggtcaaagcaggaggatcagttgagcccagaaattcaagaccagcctggacaacatagtgggagctcatctctggaaaaaatttaagaaactagcccgatgtggtgtcatgtgcctgtgctcccagctgtttgggaggctgaggcaggaggattgcttggtcccaggaggtcgaggctgcagtgagccatggtcataccactgccctccagcctgggtgacacagtgagacactgtctcaaaagaaaaaaggagagggagaatggatattgggcatgcaaacaacaggcgctgccacaacctgctttgaagaatataatatttatattaggaaaataacattttagtggcattaaatccttatataggacataaatttaaaagatccccaaactgcatttaccatgtgtctgattaataaaagcagtaaatctctaggacagagtgttctgctttggatgtctcagcaggagtcattggaaacaactagttgggttttatatatttttaaaaagctgaaaaatgacttcttcaaaacaaccgggaaaaaaagactctttggggcctggtgtggtggctcacgcctgtaatcccagcacttcgggaggctgaggcgggcggatcacctgaggtcaggagtttgaggccagcctggccaacatgggggaacgctgtctctactaaaaatacaaaaattagctgggcgtggtggtgtgcacctgtaatcccagctactcaggaggctgaggcaggagaatggcttgaactcgggaggcggaggttgcagtgagtcgagatggcgccagtgcactccagcctgggctacagagtgaaactccatgtaaaaaaaaaaaaaaaaaaaaacacttcaaattaaatccttttctcttttggagatagggagaatcaagacaacaacaaaaacaattgaacagatatttattgaactagcaggagtaacatatgttagaggatacaagctaggaataaacatatttaaagaaaatgttcaagttgtttaggatttaggccgggcatggtagctctcgcctgtaatcccagcattttgggaggctgaggtggatggatcacttgaagtcgggagttcgagagcagcctggccaacatggcaaaaccctgtctctccaaaaaatgcaaaaaaaaattggtggacaccatgcctgtaatctcagctacttgggaggctgaggcgcaagaattgcttgaacccaggaggcggaggttacagtgggccaagattgcgccactatactccagcctgggtgacagaatgagactctgtctaaaaaaaaaaaaaagttgtttaggatttaatgaatcaagatagactaatacaatatatgaaatagttattaattccaaatatgtgagacctaccctcgagagaagtatgtgttagatgtacatctgtctatatcccacccatagaaataaaaagggaatggggctggacacagtagctcatgcctgtattcccagcactttgggaggccaaggagggaggattgcttgagcttgggagttgttcaggaccagcctgagtaacatagtgagaccccatctctataaaaaatcaaaaatttagtctggtgtggtagagcgagcctacagtcccagctgctacttgggaggctgagctgggaagatcgcgttagtccgggaggcagagattgcgagccgagatcttaccactgcactccagcctgggtaacactgagaccttgtctcaagttaaaacacttagaggcagaagcaaacaataatctacaacatatgcaactgtagaccactatatacataaatatataagatgggaatgtttctgctctgtgaaaccagataattttttaagtgttctataatcttttttttttttttttgagatggagtctcgctctgtcacccaggctggagtgcagtggcgccatctcagctcactgcaacctccgcctcctgagttcaaacgattctcctgtctcagcctcctgagtagctgggactataggtgcgtgccaccatgcccagctaatttttgtattttcagtagagacagtttcaccatgttggccaggctggtctcaaactcttgaccttgtgatccactcacctcagcctcccaaagtgctggacttacaggcatgagccactgcgcctggcgtctgtaatcctatttaatatctactattctcatggtaccagttatatatttagtgaatgcctcatatttacaatgcactttataaaggaaattcattcacaatttgccacttaggtgagaaagtctggattttggcttcttaatagttatgaatttcaaatctggggaaaacccagccttgtgttttttcccccttttcctttcatcagcacttatcagcaaccaaacactaagtgtctgttgacttttctccagctgataaaaaacaaaaaactatagagactccctgtgaaaagagggccagttgtgctggcctggggccaggctgcacgctctgtgaccttgcctcttcagtctgagttgtccatagggcaacagttccaaatagcccatgtggctatggcagtaagcatagagagtgctcatgaaccagataatgtaacaagttatgttagcctggcctttgagctcagtgagccatcctttgagccttttatgatactgcactttcaggcatccttttgggaagatccaatggatcagggaccattctctatcttatagcagtggaaatgtttttggcactgtggtattaaataactactcatttgaacgtattgtgcaatgacttagcctttcccatcattattagttcccattgaagctgttgtgctcagtttgagtttccagtagggactatgaaagaaaatggaaatctcacaaattgtacttttaaaaatattttattcagtgctaatactgttatctcatattttggcttttgtgtctcccactgtatacccccatttcccctctgctttcaggtgaaggtctcccacaggtgtattactttggaccatgtgggaaatataatgccatggtgctggagctccttggccctagcttggaggacttgtttgacctctgtgaccgaacatttactttgaagacggtgttaatgatagccatccagctggtaagttggaattgctcttctagaagagaataagctggttcctcagccacatccttgtgggccttttggtgatttactagccgtagcaacacatcaagaattagtactcacaggcttgatggcattctgggaagctggctggggcaaaaagggtaaattcagagaagtcacactacatctgcaatttgctctattttaagactttgcaccttggagcaatgctctgcccttaactgaagaggaagtatataatttagattagggagaaagaggtcgattagatggagttgtaaaaatgtgaataatttatttgattttgttttgttttgtttttcatttttgagacagggtctctgtcacccaggctagagtacagtagcatgatcatagctcagtgcaacctcaaactcctaggctcaagtgattctcctgcctcagcctctccagcagctaggactgcaggtgccatgccagctcatttaaaaaaaaaaaagtgttttggagacagactcccactatgttgcccaggcttgtctaaactggtctcaagcagtcctcccacctcggcctcccaatgtgctaggattacaggcatgaaccactgcacccagcctatttatgtgttttaaatatagctgtaaggttttgtcatgtcctatctctcccttcactgttgcaaccaagaaaagattgatgttataacccattgcactaacactcagattcaaaattgtgtgactaggaatttgctgtagttctcaggcctccagttctctcagagacaaatttcagctgaagaggcagctcttgtagctcctaccaaattatacacaaataccagtttaagaagcagttccaacagttcctttgagaagtttgtcacaagccctttggggaaggatgcaaatatatcttcatttgtttaaaatggtaatggtctctcccactgtcctataaaaatttggaaatgttagataattgactttgacttttgagccccaaattcaaatatctgagcttctctttctctactaaaagttagtagaaaagggctgggaatggtggctcacgcctgtaatcccagcactttgggaggccaaggtgggcggatcatgaggtcaggagatcgagaccatcctggctaacgcagtgaaaccccatctctactaaaaatacaaaaaattagctgggcgtggtggcgagcgcctttagtcccagctactcaggaggctgaggcaggagaatggcgtgaacccaggaggtggagcttgcagtgagccgagatcgtgccactgcactccagcctgggcgacagagcaagactccatctcaaaaaaaaaaaaaaaaaaaaaaaaaagttagtagaaaagcttagtagatagaaatacttaataaaatttgaaatgcttttatgattattatttttggttatatttaacttaacataaaaactatagccctggccaggcatggtggctcgtgtctataatcccagcactttgtgaggctgaggtgggagggtcacttgaggccaggagtttgagaccagcgtaggcaacatagaccccatctctacaaaaataatctgaaaataaatttaaaacaacaacgatgaactgtttcggccaggcatggtggctcatgcctgtaatcctagcattttgggaggccgaggaggacggatcacccaaggtcaggagtttgagaccagtgtggccaacatggtgaaaccctgtctctactaaaaatacaaaaattagccaggcatggtggcatgtgcatgtaatcccagctacccgggaggctgaggcacgagaattgctagaacccaggaggctgaggctgcactccaccctgggtgacagagcaagactccgtctcaaaaataataataataataatgaactgtttccctgtctctgctgctaattagctatgtgatgtcaggccagtattaacttctctgggcctcacaacatcgaaaactgggttgggtagtcttgtccaaataagcataagaagatgtgggcagaaggtgaatgtagcagtggcatttgtctcaaaggtcaccaacagtttgatatcctacctgggaatacttcttttgtctcaaatgcttaattttctgacgtagcatataaacaactgatttcatttgtcatttgcaaattgtgacattatgaggtaaaattgagctatcattttagcagacctgtactatcccactttttttcctagtcttgatatttgttgtgtacgtatttatagcaaaatatttttttgtttacaagtcagtgaagtgactcagggcggtgaaaggagatgaattttactgttatttcaataattaaaaccttggtctggctaaagaaactgttttgatgtattttcctgatatacttctttacagtctttctatcatttgtttctctttcagctttctcgaatggaatacgtgcactcaaagaacctcatttaccgagatgtcaagccagagaacttcctgattggtcgacaaggcaataagaaagagcatgttatacacattatagactttggactggccaaggaatacattgaccccgaaaccaaaaaacacataccttatagggaacacaaaagtttaactggaactgcaagatatatgtctatcaacacgcatcttggcaaaggtgtgtttttttctgttccatgaaaggggcgagtcattagaacagtttattatttctgtaacattatatccccattgtgcattacaacttgtggtttttattgtttcacaaggttgagtgatttttatacatgagaagttgagatggtaagttaatgacttttcaaagaatcctatagactatgcataggttcttaattctttacactgtttccaaatgtttagtttctgagcagtgtgagtacttgaattattgtaaaaagaggatagcattttaatgagtttagtaatgaatttggtatttacttatgtatgaccctatatatgatagtcctgaagaggacatcaggctgggtcagcggtggggaagagtgcctcactaaaaatggagtagacttctgttcactgcacatagttctgcacagaagtcttcaaggaagagcttctgtcttattcagtgaaaatatacttggtttaccattagtcttgcaatttactcaggataaacaacctgcacaaatattgttaaatgctctaatcaaggcagaagaccttacctgtgaggaactagcccaagggggagagtatttgtcagagaagcctaaggaacagtggggagaccaagcaggcagagccctaggcttatccacttcaaaaaagcctcccttttttatgtttcatatattgggcttccatggaagattctatttgaagaaaagactcctaggtgattgaaaaaaacatgtttgaaaatcaacattctagagagtagacaagcagaatattctcagattccatactcctaggcagaaataattataaaatattcttaaatattagtgaactattgcacactaagatgtattttattttatttatttttttgagatgtagtctcgctctatcacccaggctggagtgcagtggcacgatttcggctcactgcaacctctgcctcgcgggttcaagcaattctcctgcctcagcctcccgagtagctgggattacaggcatgcatcaccacacctggctaatttttgtccttttaatagagacgggatttcaccatgttggccaggctggtcttgaactcctggccttaagtgatctgcctgcctcggcctcccaaagtgctgggattacaggtgtgagccaccgtgcccagcatatttattttatttttagagacagaatctcactctcactcaggctggagtgcagcagtgtgatcatagctcactataacctcagtcacctgagctggagagatctttctcagcctcagtagctagggttacaggcgcatgccatcatgcccagctaacttctaaatttttttatagagatagagtctcactgtgttccccaggcgggtctcaaactcctggtttcaagagatcctgttgcctcagcctcccaacacactgggattatagatgtgagccaccatgcctggcctgcacattaataagtattttaaagactaatgtaatatctactaagttccctcattgagtaaactacacaggttattcacctgaggaattcaagtgatagtgaagagtaaaaaatggcattacaaagtagtatgatacaattcgatttgaaattatgatgttatcaagattttttcagtaaccacatggaaatcctcacttaagtaaatgtaatactttaaaattagactagaggtcctctggtacttactatcagcgttactttggacaagttacttaatctcactgaaactcctctgtaaaatgagggtaatgcttcacagggatattttgagggttgaatggataatatatgtgaaagcaccatgtctgacataggtctcttgcatagtgctcagcatccccttcttccttcacaatgacaagtaattttccattttacaaggaaacaaaaactgtatcttaaataataaacttaagattatgtggtttaactgacaaactctagaagttgttttaatgcccacttcctgggctcagccatttgtgtactaattttattgttcttaagaggaaagacaagaacagacaagggatgggtgttcatgttatgtttgtataagatacagagtagtggttaagaaaaaggatgcaaatcctggcgctctttcttaatagctatgtaattttgatccaataaccttcttccctcagcctcggttatctcatgtataaaatgggtatgataattatgcctgtaatatatggttctatgagataatgtatgtaaaatgtttagcataatgcctgataatagtaatatcagtccatattgtaattatcccgattattatttattcaacaaaatctgttttaagcatctactgtgcatcagtctgtttcatctcttggtgtactgccattcctgccgggacttttgagtttacccccagacttggcttactgagtaccagagtttttcaggtcaaatctaacctgtcatcatattttgtgctctctgcattacagagaatacataaagaaagttgtcactgctttttaaactctttcccatgcctcaaacgatagaagtttttgtaggaactctaatgctattggtttttaaatgtgttgcatttttttgtgttgcaaagaagaaatgactgagatgtgtattttcaaatggctttgagaaaatcacttcttaattttacagaggaggaggacaagagaagaagcctcctaaaccttgcattagttgccacatcagagtagccacacttacttagtccattttgtgttgctataaaggaatacctgaggctgggtcattttataaagaaaagacctttaaatttggctcagggttctgcaggctgtacaagaagcatggcactggcatctgcatctggtgagggcctcaggggcctcatgctgcttccactcatggtgtaaggggaaggggagcagccagcatgtgcagatcacatgggaaggggggtgctaggctcttctcaccaacctgctttcttgggaactcatccctaagggaggtcgttaatcagttaatgagggatatacccccatgacccaaacaccttccatttggcccagcttcgaacattgggatcaaatttcaacgtgaggtttgtgtgtgttggggggtccgggggaaggacagaaatccagaccatagtagccaccttcccactgattaagcttttactgagaagcccaatttatattatttaatggttgaaattagggtgagaacactgggttaccttgctccctgccttcaacaaatatatttaacctaaaatcagggatgttatgcatgtaaaccaagcacatctttctgattggatgaaagcacacctttcaaccaatcagaagaattgaagaattttgtgtcctgctggtctcactggtattggaaacctttcttctttgaaaatgaaaatatgctgcatgaaaaaatgagggcatgtagaaataatgaattggacaagtgtggagtgttcaaagtcgtatgaaaataaagcatgctctggttttcactcttatttttttcctgaaaggccctaaaggcttaagttatcagattattttagaattttagagctggaaaatgacttttcaaattctccccagattgaacactttattttcagatgaggaaactgagacccaaagtaggtgacttgaccatgcttaatttcactggattaaattagtggaaaggataaaccaagatctagatacctaaatcgttgagctgatttaggtacccttattttgggtaccttatttaggtacccttcctgatttaggaacccttatttttcctattgtcccatattctatagttctttttcatagttctcaggatttgaaaagttactttattacttattccagtgagttttaaaaatatattaatctcataatttattttgctgtgaaatcttttttctgtaggcctgatcaatattgaaaatgtggagagttttcgccctctagtgctcaactgtttaaaattcaaacatttgtccagtgaatttttaataaccaaggggcttcttgttacaggaagtggatataaaaatggagaggcaatgagtaggtgtgatacagtatgagaaactgcagagtcgtttctctatctgccctgctttgtgggaggcctccactcaactctccttgttcttttctctttttcatttgtgcatccttaggttgtgtcaacaaactgtttttgtataactgctttttttttcaattatgaatattttattgcaaacttcagacaagccatgtagacaaaggattctgatggtcatgctgttttcattctttttaagattgtttcaattgttgtataccaactcagttttatgttatttatctctgtcagggtacctctccttcccattagtaaccatctttttacaacctccatcaaatcattatttaaaaagttgccttttctttcttcatctaccctgtagactactattctttttcatgcaaattccctataatttaaggcaatagttaaacatgttgcacttctgtattttgagttagctgagtggctttctctggctctcttgggttttactttctgtacaaagaaagcacaatcaagttgaaggtagcctcttagtcttgcttctgtagtttattcagataaagccctaaacttgattctgaaaaataaacacataaaatgtctgagatgggccaggtgtggtggctcacacctgtagtgccagcactttgggaggccaaggctggttgattgcttgattggcccaggagttcaagaccagcctgggaaacatggcaaaacccagtaactataaaaaatacaaaaagtagccagggatggtggtgcatgcctgtagtcccagctagtgaggaagctgaggtgggaggatcacttgagcccaggagggcgaggctgcagtgtccaagaacatgctactgtactctagcctaggcaacagagcgagaccttgtctcaaaaaaaaaaaaaaaagaaaaaagaaatctgagactaaaccataattggcaaattcaaaatgaatgcatggactgggtgcaatggctcacatgggtaatcccagcagtttgggaggctgatatgttagatttgcttgaggccaggagtttgagaccagcttgagcaacatagcgacatcccatcttcacaaaaaataaaaataaataaattagccgagtgtggttccacacacttatattcctagctactcagctgaggcagaagggtcccttgggctcaggaatttgaggctgcagtgagccatgatcacaacactgcactcaagcctaggaaacagagcaaggactctgtctgtaaaaaagaataaagaaacgaaggtgtgtactacttagattctaacaatcaaagaatgtgtaggatgttttctgagatgaagttgcagttttttgttaactattttgcagttctttgtcatcttcaccttcccaattaaaaggagagaaaaacccagcaacttgttttagatacgcttccagaatgcagggactttgattttttgttttattttgttttgggatgaggtctcattatgttgcccaggcttatctcgaactcctgggccgaagcgatcctctcacgtcagcctcttaagtagctggcactacagatgtgtgtagccttacccatctaattttgaggagaccttagtaataaattctaaaatgtttttgaggttataggacatggtacaaattgaatgggagccaagagagtatgtactgatgttcattgatatgaaacttaattttaagtgttaatttttatgatgaataaaaagcacttggcatgtttgctaggcattttgcagcttgtatctttgcaggcctagccagaatggactgttttaacagtttgggttgcttaatctgctgctcactctctggtggtaactaaaaggtaattgtagcccatatactggaaatagcatttcattaaaattttatcactttcaggaaggtgacagcattgagtgaggggtggaaattcactgtttagtgatttgggcttggttttaattcagaatttgctcttttctcttgatatttacttaccatcaacagatctaggcaaaggaagtacacatcggtttagggttttgatctaaaatactatccttggtttaaatatacaagtaattagtaagcagagcctttccagagccgaagggtttctgaagggattacttggttttgaacctctttctgctttaataactgcaaacataatgtgtgatctgtcttcccttttagagcaaagccggagagatgatttggaagccctaggccatatgttcatgtatttccttcgaggcagcctcccctggcaaggactcaaggtatccttgaaagtgttcagtggagggctttgtttcaatgctcagttgttaatgaaggagcctctggcttcatgtttttaagaaatgtgtagggggctggccagatgcggtggctcatgcctgtaatcccagcactttgggaggctgaggtgggaggattgcttgagtccaggagtttgagatcagcaacatagtgagaccccatctctatttaaacataaacaaataaatatttttttaaaacaacacacaaaaaggattattggctaattggctctggagataagaagcagggactaattacattagtctacattataaatgctctcctgggctttggaaactgttttgttcacatttgtcttccgtttcttaatttttccttgttcttggattttccatgatcttttccctcatttcctcccaggcttgacagtgctgcttttctctctgtgttggtattcctcctccactaccattatgtagcaggaggagtgttcccagtatgtaagggaatttctggaacaaattgttgacaacagctgctacacattttaccagaaaggccagcagggtgtactcctcaggaaaacttggaaaatatttgtttatcctatgtaggctaagaactcacctgaactaaaatgaaaatccaggtttaagattgcttttcaagtgtattattgaataaatgcctattcagacaatatctattcattgcaaaatgtgtagagtttaaatagccttccttaggtaggtgtcagtacagtggttacatgtcagtttactattataattatgagcattatcattactctgtgcctttggctgtttggctaggaaatggtgagcttctaacccattgtaagtcccattagtatcttgtgagactttttttttttttttttttttttttttttttgagacagagtttcactctgtttcccaggctgggctcgctgcaacctccacctcccaggttccagcggttctcctacctcagcctcttgaatagctgggattacaggtgcatgccaccacgcccagctaattttttggtttttgttttgagacggactctcgctttgttgcccaggctggagtgcagtggtgcaatctcggctcactgcaacctccgcctcctgggttcaagcaattctcctgcctcagcctcctgagtagctgggactacaggcacacgccaccacacccggctaatttttgtatttttagtagagacggggtttcaccatattggccagactggtctcaaactcctgaccttgtgatccgcctgcctcggcctcccaaagtgctgggattacaggcgtgagccactgcacccagccaattttttgtatttttagtagagacggggtttcaccatgttggtcaggctggtctcgagctcctgacctcaagtgatcacccatctaggtctcccagagtgctaggattacaggcatgagccatcgcgcctggcccaagacatattttttggttgtaatttatttcaacatattaatatggaaagaaacttaatcagtagtttggggtactcctacaccccctcttccagaaaggcaggatggttcattttgctgtaggctttctagactattgtcctaaaacgtaagacttccacccattccctttgagattttatttcttcactcttaaattcctctcctgtcatatacatcttctcattgatttttatagctttcaaatagagtttcatgtcaaacttggtcatcatacagccacacaatgcattagtgtattattaattgcttgaaactctctcgttgtccataaatcattttagtggtagttgtagatctaaaatttctcctatttacttcagaacactattgcttaagtctgagtgcagcaagctaggtaaagcctgacaagaattccctaggagcccactgttgatccagggttcagaagccctctggctatagctctgagcataccagacttgggctgcttttgagttactgacatacaccaaacctgttagccatggctgtaccatagacaacttttttccctctggaagcacattgttgaaagacatttttcagttattgttttttttctgttcaaagtctcaatatatgtgtagtagaattacttatctgtttcccccacctggattagcagtacttttagagctgatctaagagagaatgctgaatcatattgaattatggtggccatgggatattactaagcttctgcaattttgaaaatattggccacataatattgttattttcttatcctagccactcatccattatatttgatggtgtttatctgagacaactaaatattttcacaagtaaaattttccagaacacagcagatgtttgtatatatctaaatatataatttctactacatttcttatttgttagtgttagaaaaaaaatcaagaccaacaaatactgcgaatttgagtgaaacaaccattgtgtccaaaaacatattgaatctcccatgtttaggccctcttttaaagtaactttctctctttactctctacaggctgacacattaaaagagagatatcaaaaaattggtgacaccaaaaggaatactcccattgaagctctctgtgagaactttccaggtgggatgctaaaaagacattccagtgtgactgagctttgaaactaggtagagtccatgactgggtatctctagataggggtgctgtttaggtaattaacatttccttttgtgatacagaccaaagtaggttttatcacttttattttgtcagtaaagaaaacatcagtgtcaaattgtctgtataaataacccctttgtggcccaatgcttccccacaactgctatggaaagcattcagctaatgagcagggcctttcatctctttcctaacagaggagatggcaacctaccttcgatatgtcaggcgactggacttctttgaaaaacctgattatgagtatttacggaccctcttcacagacctctttgaaaagaaaggctacacctttgactatgcctatgattgggttgggagacctattgtaagtatccttttttttttttttttttaacctcattacctcctttctccaaccagcactgcctcatgcctttacttgccagtctttctgcttgaatctttggtaaaaatattcctttgatcgtagactgtatatttactagccttgtctgggtgttgccataggttgctcttactagttcagaagtaggaagtattttttcctagtaatataggaagataataacttgtgtgtcctaagataacagaatttaagcccagtttttaggagaagtttcatttgaatgattcagaagtttgtttgtttgtttgtttgttttcccaggctggagtgcaatggcgccaatctcggctcactgcaacctccgcctcctgagttcaagcgattctcctgcctcagcctcccaagtagctaggattgtaggcacacaccaccacgcccggctaatttttatatttttagcagagacggggttttgccatgttggccaggctgatctcaaactcctgacctgaggtgatctgccctccttggcctccgaaagtgctgggattacaggcgtgagccaccacacctggccccatgattcagaagttgatgccacatacgctgttaatgtacttgacctttgtagcagtggaacccagcatcataggaagcttttgaatttgttgttctggtcaggggttcacagggccaaacagatatcagtggaggaaattttttttttttttttttttttttttacggagtttcactcttgttgcccaggctggagtgcaatggtgtgaactcagctcaccgcaacctccgcctcccaggttcaagcgattctcctgcctcagcatcccgagtagctgggatcacaggcacgcgctgccacacctgactaattttgtatttttagtagagatgggatttctccatgttgctcagtctggtctcgaactcctgacctcaggtgatccactcacctcggcctcccaaagtgctgagattacaggcacgagccaccgcgcccggccctggttttttgttttcgaaggtaagctactctccaatgaactattaaggaccaggctgcctcccttttgcagatgagcaaactgagaagacaagacaacttgaaagtgctcttggtagctgaaaataattactactactctattagaattagaatcattctgtcctttgcatatgcatcaagttggacctgtttcccccatttgactttttgtttcatttttctagcctactccagtagggtcagttcacgtagattctggtgcatctgcaataactcgagaaagccacacacatagggatcggccatcacaacagcagcctcttcgaaatcaggtatgtgttgatcctccattctttcagacactacccttcttcttggctaatattaaaacccaaattcttcagcttctccgctttagtgtatgtactgaaaataaagatcaaatgcttgccatttcttacaggtgtggtatgactttcaagcaaccctcagggcatgtatagttgcactgagatgtggccaggtgccctatatgaagcatccagtctaaagagtcagcctggccaagtgcagtggctcatgcctgtaatccaagcactttgggaggccaaggcaggtagatcacttgagccaggagttcaagaccagcctgggcaagatggtgaaaccctgtctctacataaaatacaaaaaattagttgggcatggtggcacgtgcctatagtcccagctactttggaggctgaggtgggagaatcacctgagcccgggaagtcaaggcagcagagagccaagattgcttccgcatttgcactccagcctgagtgatagagtgagaccctgtcttaaaaaaaaaaaaaaaaaagtgtgtgggcctgtcagagtctgttggctgttggggggaactagctataagttaggatcagaggcatctaccataggaccaaaagacctgttggaggctactctgggcacagtgcctgtggagtagccctactcgccaaggagcagtttaaaaaaaaaaagacctgtcgcacagacaggatgtaccaggtagcccactttgggtctcatctgtagtctggtctagagctcttgccagttctggtttttccttgctggttaagaatggtaggtactttggacttccaactgacttgggcatgaaatggaacctccacaccaccccttgttcttctacccgggcaaattatagagctggtcaagatttgagatggacctgcagtgaagactcagcttaggcgatgtcatctgtccttcattgttcgttgtttggaaaactagtggtctcagtgagggacatctctcagcctaaagacagataaggcaaacacacaccaaaaaatcaacaagtttgacatttttaaaaagggcttatgtatttgggaagtaaatatgacataggatttttatctttatattaaatatattgctaagagaaaaacagagaccacagtaggtaaataagcaaagcataataaacagattacatatttttaaaataattatcacatatcaaattagcttatttcctctccttatgatttcactttcttgtattaacatttttacaagaaaatacaaaaacatttatttcatagatgcacatgtgcaagtatataggttaagaatagtatataaacacacacacacacacacacacacacacacacacacacacacacatgtccaatggagtacacccacaaatatattttctcaccagtaagtatatactcttggcaaaatatgtggtttggtgggtaagaaaaaagtatgtaaaaggaggaaagccatttactagagagtacatataaacgagaaaataggtgggcaaaaaagaaagggttaagcaaactctgggcactaattgggtccatagtcacatcctttaaagtcgttgtttaagatttataatttgactgacttctggtttgacaacaaaagactgttgacttctgcagttctctcccatccctccctttttaaaagctaatagctagtgcaggtgagggcacagttaaactgacatattgctgttgattttacgaattgtacaaattctctagaaagcaatttcttttttcttttctttttctttctttttttttttttttttttgagacagtgtcttgctctgtcacccaggctagagtgcagtggtgcaatctcagattacctcaacctctgtctcccagattcaagcaattctcctgtctcagcctcccaagtagctgggattacaggcacataccaccatacctggctaatttttgtatttttattagagatgaggtttcgccatgttggccaggctggtctcgaactcctgacttcaggtcatccacctgcctcggcctcccaaagtactgggattacaggcgtgagccactgtgcctggctagaaagcaatttgatcaagttattttcttctctgatgaaataccttacttcttgaaatcaatcaataaaaccactcaaagtataggttatgtgcataaaactgttgcattgtcattggtagcagagatatagaaatgatctgcctatccacctataaaggcatggttataaatctacttcacatcctttattgaataaactgggttatagtaaagtgagctggacgggatggggaaataagcagaatcaatggaaggagatcaaaattattaacagaaatagggttggaagtgtagtaatatattctaaaatattttaaatgaagttttattactctataatgcggccaggcgcagtggctcacgcctgtaatcccagcactttgggaggccgaggcgggtcgatcacctgaggtcaggagttcgagaccagcctggccaacatggtgaaaccctgtctctactaaaaatataaaaattagctgggtgtggtggcacatgcctcaaatcccggctactcaggaggctgaggcaggagagtcacttgaacctgggaggtggaggttgcagtgagacgagatggtaccattacaccccagcctgggcaccactgcactccagcctgggcaacaagagagaaactccatctcaaaaaacaaaaatgcatttaagtagaaaatgtatgtaaagaaaaaatagataagtagtgtcatatcacagtcaacatatatccttgtgtctctttttttttttgagacagagtttagctcttatcaccaaggctggagcatgatcttggctcactgcaacctccgcctcctgagttcaagcgattcttctgcctcagcttcctgagaagctgggattacaggtgcctgccaccacaccgggctaatttttgtatgtttagtggagatggggtttcaccatgttggccaggctagtctggaactcctaacctcaggtgatccacctgcctcagcctcacaaagtgctgcaattacaggcatgaaccaccatgcccggcaccttgtgcctattttttagaatattttttattttttaaaattcttttttacctccattctcttagaatgtgatagaattttttttaaaattttatttatttatttattttgagatggagtcttgctctgtcgcccagggtggtgtgcagtggcgcgatctcgcgtcactgcaacctccacctcccgggttcgagcaactctcctgcctcagcctcccgagtagctgggactgcaggcgcacgccaccacacctgcataatgttttgtattttagtagagacagggtttcactgtctcccaggctggttgcgaactcctgagctcaggcaatccgcccgcctcggcctcccaaaatgctgggattacaggcatgagccaccgcgcccgtcctagactatcttaaaatatgtgtttcctttactttcctgcttcagtgaatttataaccaatgctgtggttttgcatggatttttaaagtatgaggaaaagagatgattgaaaacttcggttgtcagggtaaaaactgagtagtgaatttcaatgtacttttaaatgaaaagtctctgaccacagtatataattatttaggaaaatctcatctgtatttaactactatgcttatttttgaaaagttgaatcttgaatatctctctttgatatatatttttttctctttttcttttctttttcttttttttttttttttttttttgagaaaagatttcactctgttgcccaggctggagcacagtggcacaatcacagctcactgcagcctcaacttcctgggctaaagtgatccttccaccttagcctcctgagtagctgggactacaggcacacgccaccacgcccagctaatttttttttttttttcgtattttctgtagagacagtttcactgtgtttctcaggctgttctcaaattcctgggttcaagcaatctgcccacctctgcctcccaaaatgctgggagccactatgcctggccctatttttttaattttagagtttttagtatcctgtggctgctaagagattggaattccttcacgttgatgtaaatgttataacgccttcccaccaggattctgaatccttgctgggtaaaattctttctgcactatgcactctgggtaatggatttctagtgtctgttcaacctttggtctatgttaatattacatttcttctatctttaggattgttttcttatgccctttttttttttttaagaaaatttgcagccaaatctctctcttattactctaagaattgaaaacaagatgattttctagactaattcctttcaagttttgaaattagcaaaagaaaaatacagtttctccttgagcgagattgacaggtattgactttaggaacagctaacctttcatcagcaactttgactcagtaaatctgagctgaggacctgctatgtgaaactgtatcctgtgggccagggaaggtggctcacacgtgtaatcccagcactttggaaggctgaggcgggtggataacttgaggccaggagttcgagaccagcctggccaacatggtgaaaccccatctctactaaaaatacaaaaattagctgggtgtggtggtgggcgcctgtaatctcagttacttgggaggctgaggcaggagaattgcttgaacctgggaggcggaggttgtgcagtgagccagtgcacatgagactgtgccactgcactccagccggggcagcagagactttgtttcaaaaaaaaaaaaaaaaaaaaaaaagtatatcctgtggataccaagtagggagtccttgtcctcaaagagctgacaagtagataagccaaatggacagataactataacacaaggcagaacagataagcatcccaagttgcaaattattatcatctgggtttggaagaagaaatttcatctagtctgagcaagacaaataatttgatgagagaagctgcatttgacatgcttttagcagaattaaatgagatggaagaggcattccaagcagaagaatatatgatcaacaacaaatgttttatctagttcagttttctaaaatatatgatgcgagtaaaggagtcctaggagacaaggctaggaaagtaggttgaaaccatttggtgaagctcctggaatgctgggctggcgagttggtgcttattttaagtaggaatagggactaaagatttttaagcaaaggagtgatatgattaaaactctgcttttgaaatcttttggcacagaatgtggtactagtctggcagcaaacatggaaatcattaagcaggcagtgaattcccttgagatgtagagggagtctagatgggttatagtagggcaaatgaaacagaattgaacaatgctacagtgatataatctaccagaattggcagcccacatgaatgtcaggattaagggagaaggaagagtcaaagctgttgcagagatcttgagcctggataattaggaggcatgtggtactattactagagatggcaaagttgggggaggaacttgtttggaatttgaatttaggcatcttgagtttgaaatactagcaatgtattccacctgaagaggtctagcaggcagaggatggttctccagagacaactagagagatatttgggagtcaaggcatagagatgacattgatgataatgcctaaagagtctccttattctgggaaatctgagcctagggctcaacaaactgtttagtctcatacttacagtagaaggagaaagaagagctcagaccttggttttatcttatcccaaaactttggccataggacatttaacctatttagggtgtcagcattctcaaattggagccttgtaagagcagaggtttttgttgttttgttcactgctttaattaaccctaacacccaaaccaatgtttagaatagtgggcacttgatgcatacttgtttgaatgaatgagtgaatgaatgaatctgccaaatgaagggtgcagatgtaaatagatatttttttatagcatagatttttatttaacctttattgaaaaataaattttaagcttttcttcctactcgtttttgtttccacaaagagccattttgcctctgtttggcagctagagtagggctggattgtctgctcaaggggaggggtgtttaaaaaaaaaaaacacacacagagcagtcttttgcagcaaagaaagttcaggtgattgctgggcatggtggctcccgcctgtaatctcaacactttgggaggccgaggcgggcggatcacctgaggtcgagagttcgagaccagcctgaccaacatggagaaaccccatctctactaaaaaatacaaaattagcccggcatggtggtgcccgcctgtaatcccagctacttgggaggctaaggcagaagaatcacttgaacccgggaggcagagtttgtggtgagccgagatcgtgccattgcactccagcctgggggacaaaagtgaaacccgtctcaaaaaaaaaaaaaagttcaggtgatcttattagttcttttccatcacaacaagaatcctattttccttgtattctgggaaaattttgctttgcttgtttagattttaggtatattgaattgagtactgtttggtttatctatatacaataataaatcccaaatatggttcctaaaggactgcatttaaactcacatatattggatctgccttttaaaactatctttattccaagcacttctttttttttaatagagatgggatctcactccacctctcaggatagagtgtagtggcgtgatcacagctcacagcaaccttgacctcctgggctcaagcaatcctcccaccccagcctcccaaacagctgggactatgggcgtgagccaccacacctgactaatgtttatttattttttgtagagacagggcctcctggtctcaaactcctgggctcaagtgatccttctgcctcagcctcccaagtaacggggattacaagtgtgagctaccatgcctggccaagcacaatttttttgaacataaattttacctaactagagaactataattaaactatgaatttggatagaataaacgttcctaaaagctagatccattcagaaagatcccagttgagttagtctttccatcattttatacttcgtgtttgtcctttcccagtaccaaaagttgtaaatcttgccatgggtctgattcctctctaaagaactgcgtattacaatccggcagaaaggggatgaaaaccttaatagttctgcctgcttgcttctacctggcaaaacgtcctttgcattatctgatcaaattcaatcaggaagtaagtcctgccggtatccacagatctgatattagagtacaacatattgtactgtcataggttttattcagtgtgcttgttcaacacagtaaatgtagactgttgcattgactactatgtgcatgcagcagcactcttcctgccctttcagtactttaaatccaagcttgtgacaatccttacgtaaatgctacataaacattacaccgcaatggttcaggagttatgatagcgtctcctttttctctggctgacctcttttattatggtgggttttgttgtgggtatgtgaaaaagaagggctacttagtaactagcaggttagaggaacagatcccattttgacagtggagagagtcatattgactattaaaagcttttaaatggtaacagacatggtatcctaccccaaaatgtcacttactcttttttgtgtttttgtatgtgtagcataggtgttttgttttgttttgttttcattcgccatgtgaaaagagatgcgtagcatatgtttaagggaaagaatttattctttgtaattttgtactaggtggactgttcccttgcaaattctccaatttgactaggaaaatatgaatcaaagatcagtaaaggtaatctctcatccttccaaaagaaccatatttaaactaactcaataccttataatacacggaaaaataaacgcagaatttaagagtcaaatcatgtgaggtctgaagaagatatgcctccagtaaaagagtgttttggatttgtttgtatctagactgtaagggaatacatttaaaggacataaagccttagaaaaatatattgtggctggctggggtcggtggctcacacctgcactttgggaagctaaggcggtggatcacctgaggccaggagttcaaaaccggcctgaccaacatggtgaaaccctgtctctactaaaaatacaaaattagctgggcatggtggctcatgcctgtaatcccagctacttgggaggctgaggtaggagaatcgcttgacccaggagtcagagtttgcagtgagccgagatcgcaccactgcactccagcctgggcaataagagcaaaactctgtctcaaaaaaaaaaaaaaaaagaaaagaaaagaaaagaagagaaaaagaaaaatatattgtggctttgtgctgttatgcttagtgactacagcttgttatgagcataatttttctaaaggaaacattaggccacattgctaaataggcaaggtagtcagttatcttcataaaatgaataccttaaaaaaaaaaaaagctgatatagttatttgtttctgtctttttacagagtactgtttagttctgaccgaggctcagggtttgctagttgaaggggctaagtttgcgcagagataatctgcctccttgtgacctgcgtgcagtttcctaacatgctgcctgccatccagtaggagcacagacagagattgcacactcctcctggccacaggatggccacagctccacatagagctcagtgcaggagacgtctgcccctcctcatttctgggacctttactctgagaggagctttgaaacaagcaagtgcaaaactgaaaatagattccttagcgtcttctgttctatcacctagtcactgcggctcacctcttctcttaattctgtattccatattaaaagtttttttctttctgtatgtgttaagtgttttgtatttcagcagacacctgtgttctaacccagctccttgtaggaggaaacttggtgattctgaagtaatcctatctagataaaccaacatttcctagggaggtatcttacaccattgtaaggatagggcagagtttgaatagagaattgcagacttctagggtggtttccgtgatttttctaaaagcgtcacagaattgatactctcgtctctggatagtgttgagcctgggaataatccccttttcaggttgttgtcagtgatttttaaacttccctcctatttgataaggtttatagaatacaggatatctctgcacaaatgacagattacatggcataacccctgtctggcatgggaaaactggttatgtttcatgagcttaatagaaggaagtttttagttttgttcaagtatatacttttttttttttgagacagagtctcactctgttgcccaggctggagtgcagtggcgcgatctcggctcatgcaacctccgcctcccaggttcaagcaattctcctgcctcagcctcccgagtagctgggactacaggtgtgcaccaccatgcctggctaattttttttgtatttttagtagagacggggtttcaccgtgttggccaggatggtctcaatcttctgaccttgtgatccacccacctcggcctcctaaagtgctgggattacaggcgtgagccaccacagctggctcctgttccattcttttcttcttccgtcttacccccaccatatcataaaagaaaaaaaagaaattttaatattggaagtgtgataaaaccagaatgtaatccagtatattctctttgctaaccttttggtactattcagtctcattcttgttagtttatagttgaagacagttaatgaggctgagaagacttacatgagaggccaaaatgtttctttataaatggcagcttttaaggtattttttgagccataaagtgaagtagataaagttgtttgtatatgtaatcaaaaataattttttaaaatgagttttttatgaagaataggatttggtgatttttttttttttttttttttttttttttttttaggcagatctcactctgtcactcagggtggagtgtggtggcacaatctcagctcactgcaacctctgcctcctgggttctcagcctcccaagtagctgggactataggcatatgccaccactcccggctaatttttgcatttttagtagagacagggtctcaccatgttggcgaggctggtcttgaattcctgaccttaggtgatccgcccccctcagcctcccaaagtgctgggattatggcactttgttagtgtcactcttacattaatccctgccaaatgaatgctgggagagatttttttcccctgccatagggcataggtgggggttttcactttttcaacagtcttctgtgttttctcaagtatttttgttacctttacctttcatttatgctatgctggattgctactttcttgtttcaagatttacctactacatagtaaaccaatcatttccatgaaggtgatgcaatcacgactgaaaattttaaagcgttcccccaaggagttaccactacttgagattcctgctcctgctttgggggacttacacactccatgtggagctctgcttttcaagtaatgcagagaaattgactttgctgaatgacttttctactcatgcacctcttgagtgacatttaattagatgtgtatgcatgagtgatctttaagaatgaaggatttacatgctgatctcttccactagtttgcttaatctaactagctactgtgctgatgaggcctaatcataactcctgtgtacacagtattgcctagaatacctttcttggagagttacactagcagactgctgtagttgtcagctttctttggtttcatctatttcctaggcattctgttgctttctaaaactgcaaatggccctttctactatgttatcctctagataccggtccaagctcttaaattccagaaaacagtagccctagaatttaacatcttaccgaaaacttgcttccaaagtaataaacccgcaacccctaggttcacatctgtacttagttttgatgttttcaacagatacagaaggcattggcgggcagtagtatggtatagtgtgtttttccttcatcatagtggaagcatttatgaagcaatctagagtgttaacattagttttctatttatctttaaaagataaatagcatattgctttgagaatggagatggaatgtgatttttaggcctttgaaaaatgtcttggtattttcatttaaacaaaaatcttaaatctttcaacaaattatttattgaactagaatgaatataaagaaccacatagccctgtgaatcagacaatagcataaaaccagagttcttatgtgtagtcagtaaaaatggaaataattgttgatcagctgtccagggttttcttaactttaaaagcccatgagtatacatgaacatacatttccagccattttctattttatctgcctcaaaaacaaatgcaggctgggtgccgtggctcacacctataatcttagcactttgggaggccgaggcgggcagatcatgaggtcaggaaatcgagaccatcctagctaacacagggaaaccgcgtctctactaaaaatataaaaaaattagcaacctggtggcgcgcgtccgtagtcccagctactcgggaggctgaggcaggagaatgacgtgaactcgggaggcggagcttgcagtgagccgagatcgtgccactgcactccagcctgggtgacagagcaagactccatctcaaaaacacaaaacaaaacaaaaaaacaaatgcaaaaacagagagcattcatgagatgtaattgcatttagtatgtattatagaactcaacattaaatggcttaccattgtctggatttttttaagcacttaagtttttagaaacctgacagtactgtataatagtttaagagcttaaatattatatttcaatattacaaaaaataaaaagttctagagaactgaaaaagtctatcactgataggtttagttatagatattacttctaatattacaagaataggtttattctcagatctccagcagtcagaataaatgagactaagtgctctgaggatatagacaatgtcagtaagtttataaaatatggccggcacggtggctcacgcctgtaattccagcactttgggaggccgaggcgggtggatcacctgaggtcgggagttcaagaccagcctgaccaacctggagaaaccctgtctctaccaaaaatacaaaattagccaggcatggtggcacatgcctgtaatcccagctacttgggaggctgaggcaggagaatcgcttgaacctgagaggcggaggttgtggtgagcggagatcgcgccattgcactttagcctgggcaacaagagtgaaactctatctcaaccaaaaaaataaaaataagtttatgattatgttgtacaccagtcttattttggaaaatgaaacatttgaacctcttttggcagaaataattgtagtaggggaatattttgggtagctttgattctctctaacataactagcagcataaaatcaaacccctcatttataaggtaatagagcaagtccatacagctgccttctcatagaatatgtttattctctgaggaagagcagagaaaatatgaacaggatcctttataatactcttgtccatatgacttcgtattccattaataaaaaggagtaaattggccaggcgtggtggctcacgcctgtaatcccagcactttgggaggctgaggcaggcggatcacgaggtcaggagatcgagaccatcctggctaacacggtgaaaccctgtctctactgaaaatacaaaaaaaattagccgggcatggtgctgcgcgcctgtagtcccaactactcaggaggctgaggcagaagagtggcgtgaacctgggaggcggagcttgcagtgagccgagaatgcgccactgcactccagcctgggcgacagagcgagactccgtctcaaaaaaaaaaaaaaaaaaaaagtaaattgtagctggtgtacaaagctctgatttttacgagaaatgcctttttggtgacttacgggtgagctttaagcaactcttgtcaatgagatactgaaatatggggagtgaatatagaccctcaaaccattacttccttgcccttcgttttttatagaatacaacttttatagctgtgaacatttgtaagatttatagtcctttctggttttcatgcagagcagcaatatcacatcctaacccctgcagctgtttatatcagcagcaattaaaatttgatttactaatccctcattgctgcctctccaactactcatttttcatttttgtagagccttaggactgttacagctgagcattatgatgttaacaactcagccatctggcacaggggaagaggcacctaaacagattcttctggacaaaagtcacatatgagcaagatcagaatagtagcagatgtaaaaagcaggtaaagaaggagagcctgaatgatactaaggtgaaagcagaatccaaagaggtttttagttgaaggtcgaccctccttttgctttccagaagaaaataattcatagtatcatattaataagtaaactttttctaattcagtctagacgctgttagctagaagaaccaggcaaacgatgtagctattttttttgttattattattattattttttcgagatggagtcttgctctgtcgcgcaggctggagtgcagtggcgcgatcttggctcactgcaacctccacctcctgggtttaagcaattctcctgcttcagcctcccgagtagctgggatcacaggtgtgcgccaccatgcccagctcatttttgtaattttagtagagacaggctttcaccatgttggtcaggctggtctcgaactccagacctcgtgatccgcccaccttggcctcccaaagtgctgagattataggcgtatgccaccactccgaacaatcttaacattctgagtttgatctgcttagtggctactgaaattttacctctatggaaactaaaagatgatcccagctttgactgtgtgttttttccccctccctcctcttttggtcgttattggttttctggttctgggtaaggagggtgtgatatagattcatgtattgactcattaaggctaaaatgaatgtagacaagcttacttttcctcactgctttccagtggttgttagtttaaaatccaaaaccgaaagaaaaacctacagggacacgaatgtacttgattttgttattgcttgctgttgcttcacctttccttccatatcttgctctcatgctttctaacgcctaagcagaatgtatcatcagagcgccgaggagagtgggaaattcagcccagccggcagaccaatacctcatacctaacgtctcacttggctgcagaccgccatgggggatcagtgcaggtatttactgcctttattgccttttcctggcctttccagcttggctggtggaatgttggcttgcttctgaaccttcggcagccttagaaaggaagcttacaggaagggctaattgaatatctctgtagattttctgtctaggtggacttgggtaagagtcgcttgttaaaatgattacttcctgttgtcattgactaagaaacatctatatgatttctgatactgatttctggttaacctagtcctaccaccttgatgcattcatgataaaccataaaaataacatcaaggtaggattgtgttagtgtcaagtctgtgaattgtaaagacctgaaacttacaagtattttttgaatagaggactaaaggactgcatatgttgctcattccatgatatgtgccttaacgcataagctgagaatgttaatttgtataagtcatctgtttctgagtgggtacccaggaagttgggctgtttccttttttctccctggaatcaatgtgatcttaagaaaattatttctgatttcatttgggctattctgaatctcttttttctgtttagtactagaacatctggtatctcttaacttgtcttacatgtgaatgtttttaataatcttagcctcaatattgttctcatactggtaagtgacaccatcagttgggacacacagtgaactcagagctgtcaaacataaattcttataaaggtgcagacaggtttgtacatgtagaaatgcatcttggtagccttgatcatctaggatatgctgttacaaggagtgattcatggaaagatcttaatcacagcttgaaagacagttttggccctatagaaaaccacataggatcatataggttaaaatgatggattgaggctgggcgtggtagctcctgtaatcacagcactttgggaggccaaagcaggtggatcacttgaagtcaggagttcaagactagcctggccaacatggtgaaaccccatctgtactataaatacaaaaaaaaaaaaattagccaggcccggtggcgcatacctgtaatcctagctactcaggaggctgaggtgggaggattgcctgaatctgggaggcagaagttgcagtgagccgagatcatgccactgcatactctagcctgggtgacagaatgaggctccatcccccccaaaaaaaaccatgatggattggacaagactgagcaacaaagggagagctcatctctacagaaagttaaaaaattagctaggatggccaggcgtggtggctcgcacctataatcccagcactttgggagcccaaggtgggcagatcacaaggtcaagtgattgagaccatcctggccaacatggtgaaaccccgtctctactaaaaatacaaaaattagctgggcatggtggcgcatgcctatagttccagctactcaggaggctgaggcaggagaacgcttgaacctgggaggcagaggttgcagtgagccgagatcacgccattgcactccagcctgggtgatggactgagattccgtctcaaaaaaaaagagaaaaaaatcattgctcttaggagccaggcacagtggctaacaccgataattccagcattttgagaagcctaggcaggaggatcacttgaggccaggagttcttgaccatcctggcaatatagcaagatattgtctctacacaaaacagaaaaattggctaggtgtggtgctatgtgcctatagtcctggctgccaggaaggcttaggcgggaggatcgcttgagcccaggagtttgaggctgcagtgagccatgatcgtaccactgcatttcagcctgggtgacagagcaagaccctgtctctttaaaacaaaacaaaacaaaacaaaacaaaaaactcaattttatttctcaggcacactttcttgtgaagccacatgaggatgtgtgttatcagaattaatagaacaagagagtagcagctgtgtgcaatagctcatgcctgtaatcccagcactttgggaggccgaggtgagcagatcacaaggtcaggagttcaagaccagcctggccactatggtgaaactccatctctactaaaaagtaattttaaaaaattagctgggcgtggtggtgggtacctgtagtcccagctacttgggaggctgaggcaggagaatcacttaaactcgggaggcagaagttgcagtgagctgagattgcgcccctgcactccagcctgggcgacacaacaagactctatctcaaaaaaaataaaaagaaaggaatatctgggatccaggaaaccagagatccagcacaggaaagaaacaaagggaatccctaatataataataaagttaggagatcctgggatctgtacaccaatagaagagagcagcttgttcaaaacagagctgcaagagcagctctttggtattttcctttttaacattatggtttatccttgtctttttataattacaaaataagcatatttctttttctctctttttttttttttttttcgagatggagtctggctctgtcatccaggctggagtgcagtagcgcgatcttggcttactgcaactgctgtttcccgggttcaagcgattctcctgtcagcctctagagcagctgggattacaggcacgtgccaccacacccagctaatttttggatatttagtagagatgggtttttgccatgtcatccaggctggtctcaaactcctgacctcaagtgatccacctgccttggcctcgcaaagtcctgggattacagatgtgagccaccgtgcctggcctcgtaaagtgtcctttagaaatggatccaactgaggtgtctttggcaactcttttgaaacatgcaacttcctctactccctataaactaagttttaccagcttccttggcacttagatagaggacaggcagttacaccatttacctaatactatgttcagctctgctgctcctcattactttggcctctttgggctgacactgtttttagcataccttttgcaaaccagattaacaatactttcctaacacaacagatgtccacatatttctgagttgtctcacttgccagaggtaatgtagtaaaatcatgtttggcctaacctgggtgacttgcagacaccatgaccctgggagggagtgcagaatctaagacaagaaaagtttgctctgataaggcacatgaaggctcctgttccaacatatttaatgggcagacccccatggttctcatccttccagtatttccacagatcttttatgtgtggaaggcctaaatgcaagaagataatatattttccctttcaaaaagattcctctaaagttgtctgaattaaaatgtttagggagcttttagaaatgttcaggaccaagtaaggacataagacttagaatgacacatgagttgaagtactgtttcctttggtacacagctctgatttctcctcacagtgacattttgagaaatgaaactaataacccaaattattgagactcctaaaagggatattaccaggtctgaacgtcaaaacagtccttcatcttagtctttctcatgagtaatgctttaagatattaattggtcttgtttggtatagccagagtaatgagcgattaattttaatagtgattaaagcaaaataaatgtctatttgaagtatgcaaatcttttttttttttttttttgagacagagtttcgcattgttgtccaggctggggtgcagtggcatgatcttggctcactacaacgtccgcctcccaggttcaagcaattcttgtgcctcagcctcctgagtagctgggattacaggcgcccgccaccacgcccagctgattttttgtattttaatagagacggggtttcaccatgttgtccaggctggtctcgaactgctgagctcaggcaatccacctgtctcggcctcccaaagtgctaggattacaggcacgagccaccgtgcctggccgcaaataaagctttttataatgaagcttattttttattatcttttataatgacattatactaaaaatttatttatttatttatttattttttgagacgaagtctcgctctgtcacccaggctggagtgcagtggcatgatctctgctcactgcaagctacgcctcccaggttcacaccattctcctgcctcagcctcccgagtagctgggactacagacgtgtgccaccatgcccggctaattttttgtatttttagtagagacggagtttcaccgtgttagtcaggatggtcttaatctcctgacctcgtgatccgcccacctcggcctcccaaaatgctgggattacaggcgtgagccactgcacccggccataaagttatactaaaaatttaatagaaaaaaaataccagccagatcacttggggtcaggagttcaagaccagcctggccaatatggtgaaaccccatttctactaaaaaatacaaaaattagccagatgtggtggtgcatacctgtagtcccagctactcgggaggctgaggcaggagaatcgcttgaactcgggaggtagaggttgcagtgagccaagatcacgccactgcactgcagcctgggcaacagagcgagattccatctccaaaaaaaaaaaaaagaaaaacataaagataatattgtttaaaatgtcagtaatttgttattcataagattctttttaattctttaaaatttattttctaaacatcattgtatttaattcccttcatatttatgaagttgataggatcatggtcatttgccttgtcttatggaattagaaaatagggctcacagaggatgttaatggtagaacaaggcctagaatccaactcttccatcacttacacagtgtttgttccactgcctgcagttcagtagtttgacaaaccagacctccaacctgaaataattaaacggatgctgtgaaggcccagatgtgtagcctttaagtcttaggtatgtttttggtacaattaagtttaaaagtagagaatggaggctctgtttatgtctcattcatttgagaccacatgctcattgatacagacaagatgtctagtctgtaaaatggggataacctcttattccttagattgcccaaggacagtgcttatggcccaagtggcaatttgtagcgaggagaatttaggaagtataagccatgtgaaacgctgtgagcaggccccatgacccagagtcaccaggtaattctcagtggtgatgcttactaatgtttcattcgtgtgagtagaagccaagacattttatttaacgtcttgtctagttcctgaattgtccactagaaacttactatgtttcctgtaacctttgtgctcacagaatgagtttaccagtattatcactggtatgcagccagaatatgtccacaagaagcaaatgaagcactgaggaaattaacaggatagcattagagtgaggagctgtggttttccaatccatataccctccttcctcaactttttggttttgctggtttttcttcaactttttgtattgaaaatttcaactctacagagaaatcgggagggaaatgcaataaactcttgtatatctttaaccttgctgaacgaattattaagattttgccatatttgctttaaatctatgagtgaaagtgtgtgtgtgtgtttgcttgctaaaccatatgaaagtaagttgcagacatcattatatcttatcccaaagtacttcagcctgtatcttctaagaacgaagacattctaagaaagttaatttcataatatctaatatatagttcatgtcacattccacctaattccagttgtccccagaattaatattgtagtgtccaggatttaatcaaggttcatgcctcacattaaccaatgcaatatgcctcatcagtcttttacaatgtcttagtctcttttaatccgttttaatctttaagtctccctgtgtttaaacaaataaaagtcttctataaagattcagctggaggccgggcacagtggctcgtgcctgtaatcccagcacttcgggaagccaaggcaggtggacaacctgaggtcaggagttcgagactagcctggccaacatggtgaaaccccatctctactaaaaacaaaacaaaacaaacaaacagccaggtgtggtggcacatacctgtaatctcagctactcaggagactgaggcaggagaaccgcttgaacctgggaggtagaggttgcagtgagccgagatcatgccactgcactccagcctgggcaacagagcaagactctctctctcaaaaaaaaaaaaaaaaaaaaaaaaaacgggttactaatgagaacaataattatttcttgtttagaaataatagcggatatagcttgctagtaagtagtattcaccctatctgtcccaaaggctacgtgtactatatatttcctcccaccctcctctttatgactattcaggaaatttttgtggattaactgctggtgaggacccctgagctagaggcagataagaataaacagttacggagagagaataacagtaagatgaccacttattgagctgttaccatgtctcatgccactgggctaagcactttctgtgggttgtctgcacagtaaacaccattaggtaagcagcattgttctcccattttagagattaggaagcttaggcatagactgaggatcttgcccaaagacccacagcaaataactggtggagctggggttcaaacttagggctgattagggcaatttctacactatgctgcttcccttatttatgctaggtattatactagacagtctcatacattttcttgtataattctctcatcaacctataagaaacaatctcaaatagatggaagtacttatccaagggcatatgatatccaaattgtttatcctattttgtgttctctcccatgtttcagccaaggtctttaacaagcagagtgttttgtccagcagtgaggccccttttcccacttcccagcacccacataaacaggaataatgtgctggaaatgaaaccaggtggcagaagcagctacacatgcaagagaagcctgattgggtccacattaaccagatgacaggagtgagagccttcacttacatttcggggaccatcagtgagaactgggatggcagtgaacctgaaataaagatcgttgaaataagactggctttccaagggagagtgtttttttaccatcttccctcttgtcggagaggatgtgacaatcttgttatttgtaacttcgaaccagtgctcaaagccatgaggaaatttctgaaggaaagtgtgattatttatagtttctggtacccactgttgacttcctttttagaactttttctttcaacatcagcactaagtctatatcattatagcataataaactgagagaactagacttcacccatcacattcaagggagccaagtgattttacctttagaagtcagccatgcagttatttttaacttaacaaagtaatgtgtgtgtttttgcaatatgaaagaatctgtgtttagaacaaattttcctcatggaaattcacagatattaactctaaaccttggttaagtcatttgttagtgtttccatctgtaaaaaaacctatttcataagatttttgtaaggattagatttacacacacaatgtagcagagtgtcagacacggagtaggcactcagtatgtaagttattatcatcattatatgattacatcattgatattagtgttctcgcatgatatgggcctgggaaccttccctaaattgatcccttaacccaggaaaacaaacattccagacactgcctgtttagcgaccctgtctggcgctggcaagagatttctgttgccatggtgcctgtcacacacttctgtctttctgtttcaggtggttagctcaaccaatggagagctgaatgttgatgatcccacgggagcccactccaatgcaccaatcacagctcatgccgaggtggaggtagtggaggaagctaagtacgtacatctttcaagggggctcttaagtcatgggttgaaaaatcttttctgtctcttcctctctgtgtgctgctcgtctcagactggatttctcatgcttgtaaccacagctttcttccttaactgttttaatttttgcatggtaccttaaggctgctactgcccttctttagctgtgatttcggggaagacagtcacatttttctagttcacatgaaaaagacatagtgaaccgaaagaatcatgttatcagggctacagtggatagtagccatgagcttcttggggctgtggagcttcttgctctatatgggatatagagaaaaatctgctgttaaaccatgggccatgctgaatagcattcgatttctgattgtgggctagcaactggatgtacaatcatggaacaaggagttcagggccattttgttcactctcaaatgattctggcttcagagagactaagtcaggcaagaaaaatattatagtctgcatctgtgaatgagagtgtgggaaaagaatggaagtcatactcatctcaggagggtaaggaggttgccccacacccttttctgcttctcttgcatgtgtatgtcttgccccacccataccaccagccccttggtgcgctgcatggtctgtgtttaaactcttaaaatctggggtggaaggtgagataactgccaattctgctgcaaaagcagcatttctaccacttttttccccatcccaaatttagatccagatttagacttcaagaagataccaggtagggagagatagagacaccatgagtcagtaactgctgctatccctgatatggaggacctttcttgtgagccctttgagaaccttcaggatatcccagggtcttgttttctgaagcagacaacgtatttatagtgatattgtacctaagtagtctcatgagcccccaggtagcttaatacaagccagaacactcttatacctctaaatgtaagttagtgagatgccactgagacctgcattcttccaccttccagatgtactttgtattgttgtctttcctgcctattcccctggtctcctgcccatcttttttatttatttattttttgagacagggtctctctctgttgccaaagctggagtgcagtggcacgatcatggctaactgcagcctctattccccaagctcaagtgatcctcctgcctcagtctcccaaagtcatgaaattacaggcatgaaccactgtgcccagccctgccagtctatttgatgaactcattttaccttcaagaagtcctttctagccaggtgtggtgcttcatgcctgtaatcttagcactttgggaggctgaggcaggaggatcacttgagtctagaggtttgagaccagcctgggcaacataatgagaccccaactctataaaaaaattaaaaattagctgggcatggtggtatgcacctgtagtcctaggtacttggaaggttcaggctgcagtgagctatggtcatgtcactgtactccaatctgggtgataggtgcgaccctgtcacacacacacacacaaaagtttttggccaggtgcagtggctcacacgtgtaatcccagcactttgggaagctgaggcaggaggatcacaaggtcaagagattgagaccatcctggccaacatggtgaaaccccgtctctactaaaaatataaaaattagctgggtgtggtggcatgcgtctgtagtcccagctactcaggaggctgaggcaggagaatcgcttgaacccaggaggcaggggttgtggtgagtcgagattgtgccaccgcactccatcctggcgacagagcgagactccatctcaaaaaaaaaaaaaaaaaagaaaatttttgcttggaaaaccagggcttgaggattcctacccaatacatcaaaagtaaatgaggatgacttgactgtcttttgttgagcccctgctaactgtaggcagcttcagagctcttctcccagcttgtataaggcactgatatataagggggtgagggttatgctggttatgccaggaaaaggccattttaataaggaaacatgctcctattctcagggactttggagatattaatggtactcacagtttttcgatttccatacaaaattacattatcttaaataaacaatatgttactcccaccctctgggctctcaactggctgcactttggagtcatttggggcatggtagaaaatacaaatgtctgagtctggcctcaggcattctgatttaatttattgaaatgtggcccgagcatcaggaattttaaaagttcaggtcattctaacatgtagccaatgttgagaaccactgtaccaagcgtggtctgattcaaacattgtcagagcttgaaggatggccgtacctgttcccagctcccaccccattctcaattcacctttgtggctattactttgaaggctagaagtttagctttggatttaatagtatactttgaatgcagtaatcaaatgggctttagttttatgttatgccctatacaggtttatcttttgaacccattcatctcatctcattttggtaaatgtgtatactaattgtgtatgtgagtgtggtatttgtgttctgtgtgtaagatatgggctcattcacacagagatttcaatctggtgtattctgtattggtataatctaacctctagaatgtaaggagagtttaaagtcttgtcatttagcaaaaaggacaaatgtgcctctttgccaccagcttcaggtttggaccttctaaaagatgtagaaagcataggggagaaattatatttgaccagatgtcatcccgaagctcatggcttagggcatttagtgatttcatgggctatcaatccatcttgcccagagaactgtcagggcccagccatgtgttatttttcttggcctttgcgtgtgggggcaaggaaagggtagccctgtgtccacctggttgatcattttcatgggaagaagtcacagctagagaagcacgaggtgttccaaacagcccctcattgcacgcagctgtgatgccatttgttcatgcagcctgcttgtggggtagaaggggatgatgcttatattgagacacacctcagtactggggagaccatgtgaaaccttcactttcaggcttttgattttgggttcctcacccagcttgtttagtgtaaaggtggaaagaaataacagggtcttaggttttgttctgtgtacaaaacgaacatgtgaattccctttttctctagctccaggacatatgtccttgtttatggtttaaagggtggtgagggcaggcagctttttggttgatttttgttacagtaagaatacaggaatttttggttatccagactttagctataatttaacaaatgtgaacctcatttctcctgagcattaacaagagtagaatttaggtccttctctggtagttataccttaatacagagcagtgaccctccttcctctgattcatcttctaataagataaagtaagtgtcgcttaaaccttttctccctctctagaggaagagctaactgctagctgctttgatcaggcatgttggacttgcacaaaggctagggactttctttttccctcagaatatttgagaggctagcttaatattgcacagtaagacttcatatgggaaccaaaatggttcacccctggtgcttgattgagttcttacaggcagggtcatttgctctttcccctgctgccttcctagaagttgcccaggaaagcccaccctggagctcctaccaactctttctgttttgccttacccctgagatccagctcccaccttgatgcttctgtcaggctcctgtccgaaccctccactttaacgtggggaccaagtggcctgggcctactcagcctaccttgacagaagaagaaactaaacacagacacatactgcatgtttgcatggctcacagggagtcgcttccatttcacctctgtggactaatatctctctctttctctctcttcctttctgtgtttttctctttatatactctgtagctgcctgaaaatgctcaacctgtggtgagtccctctctccagtccattgcaaggggagtggaccagactaggctgggactggcaaagccaaacaaaatgccttaggaacattaaatagcttccataggactccttgtgccataaccaccctgactggggatctagatccataaggtggggatggggcaggcctgtacccaggaattaatctattccttctttcaaacccatcttatcgctgtctcctcctgccataacagtatcccacagtatccaaaattatctatttttagctgagtaaattttctcccaaattaatacaaccagatatggagagggacagaagtaaaagggcaagattactgtatcagtttttatgtagcagttgtgtttactcacagccgcaaggatagtgagttgttgctggataatctcacattctgcaatgtggtctctaacctggaaattggctgctttgggaaaatctgactttttgattcagctggctcttccctctgtagagtagcaacctcaaaaaagggggagctccttcagggagaggtggatgttttgttgttgttgttttgagagttgttttgtttttgtttattgtctttttctttattcctatgtgagagtttagtaggccaaggactgactcagctaattgatatattggagcctgtcttttccactcctggaaaaggttcctggaatgtatttttaggaataacatggagtttatggaaggagaagccctcaagaatccatgtgtggtgaggaacattcttgctacaagacatagccccttcccctgctctcttgcctgtgaccttccaggtactcctgaacttgttggtctgttgcagtctggaattttaactctcccacattgtccgcacgcataaagtcatgctctatatggaggtaacagcctgctagtttcatgactgccatgtttctatttgtcttcagtgactgggttgggcactggtttctgaaccctaactatctaagccagattgcctacaggggcttcctcagggacaggaatgtattaaagaaaacaactgggttttgtggaggtcagatttatagtcttaggggatcaaagaatacctttggctatttgttttgcaaacatgtgtctgtgtaatccgacattgtggtggtctattttttcctgtgaggtgtcagtcacatgatccttactgcagatacttgagggcctgctatatgcttatccaaccctgtgcttggaactctagtggggtggggggtggggttacaaaatttgccccaaagagcttgggtaccatctagctgaagagatcagacatacacatgaaaggataaggagttctgcaggacattgagattactgcccttgagaggctgaggggccaagaggtcaccatggacaggatggtcaaagaagtccttgtaaacactgtaggacttgagttaagtattagaagaaaggaagaatgtacacatatggcagagaaaaggaacatagcaagggaatagctgaagagagagggccaggacatagtaagaatgccatatggaaaaggtagtgggtcagaggcctggggtaagagcactagatggctttgagagtagggagatttggatcgattttgactccagcatgttgagaacttcttgtcatctaaacagtcaaagaatcaactgaaaggaaacctaagccatgaggtgtccaccacctgccttcattctcttctgagaggaacacatctgaaagtcaatcagtggacttggtctagagtctgacccagtttaatagatcctgttgctagtagtcaccacagacaccaaagagttgaagaacagattgtggggcctgctttcttgtaggtagaatcattaaaagcctttgccactgctgaagctttaactacaataactagcaaagataaatccagggctctaaatttgaaatattccaactcctttgaaccataactcacacttccttttagttaggtgggttcagcattgcacatccagttatgatatgcttgtaagcaggcattaattcttatggcttgccttggaggaggtaaaagagaagtcattgtacaatttgaaatggacctaaacagtattgtaaactttttttattgctttcttaaaaacacaaaatcatcatcttagcatcctccaaaaagattaagaatagaagttgacttaaaagttagtaatacctgtgaaaatcatgattcagaagaaaagaggtaagtctattgaaatagagatttaatttgcctcttttattgttaatttcaggacattcaacttggaaaatgtccatttctaaagcattacgtatagaaaaacactatttgggccaggcatagtggcttacacctgtaatcccagcactttgggaggccgaggcaggtggatcatttgaggtcaggagttccagaccagcccggccaacatggtgaaaccccgtctctactaaaaatacaaaaattagccgggtgtgctggtgggcaccagctactcaggaggctgaggcaggagaatcacttgagccctgtaggtggaggttgcagtgagcagagatggcgccattgcactccagcctgagcgacagagtgagactcagtctcaaaaaaaaaaaaaaaaaaaaagaaaagaaaagaaagaaaaacaccaaaaaacaccatttgttcttgaattcttatccagggtttccactgaggattatttttaacaatcaaaaatgttggtcacttttatttaaaagaatttagtttccaaatacatatgacactttgcttagtgattatatttgcacccattaatagtacctcacaaatgtcattgatactttcagagaaaatctttccaaagaccctcttaagaaagtcctatttctaaaattttcatgtttgattcattcagatatgattaaagcccatcatggtctgtgtaaatgtttctgcattcttagaaactttctccagttttttataactagtccattggatgtaggaatgccaaagagtctaactaaaaagagagggaatcttggctacaatggaatacctaggggtatgggaagtaagtaatagtctttatttccatatgaatattgctggctttacacctgcaataattaggcaagagactcaaagatagttttttcagaaaagttttctttcaaggatctagcaagtctgagctatgcttccaactttactgccctccatcatccggcatctttgactcatccaccaccttctgtccctttcattctcattccccatgtgtcagctccccagaaaggacatatcttgtacaccttgccacagcactcatcacctgcttctggactgcctgagcaagagtgatacttcctgttctaaagacaggagtgaggatgggggatactcagactttgggatgtgccagaactgtggctagtccccaggaagcagaacttggaggactcataaaggagccaatcccacctccatcctaaacaaggccagttcataaaccccatctggcacagcagcagtctcaggaagctaaattggggagtgccctgtatctcactccctaaactggggagtgagagcatcctgatggtcagctcttgggctgtgacagtggtcccctgcaaatgaaaaggggagctgtactgatgtcaggagatgtggctcaccgtcattattagagtcagggcctctcctgcctacttcggtgggtgaggacagagagggggatggagagaatccttaatccttcattggtaacatcctgagatcctcctagagttccagacatcatacttatcatgggatttgtttgccttattttagcctccctgccctctggccagtgagttgaattaaataattgtgccctcagtatcaaggagtagacaatgtagactatttttatgcagccctgaggacccccagtcatgactcttgataaggtgaggcatctgggttgggtgctaaactatgagccttcttcaccctccttccagtaatgcctatttcagccctgcctagcctgcaccatcttgataattaggtaggatgactgcagattgaaatcaagcagctatttcctttggcttttctggcagacactgcccactgcctccagtgcgtgcactgtagatggtgggtggtccctatgggtgggtgctagggggaaaattccacccctgcagtaagcagaagcaggcagaagtctgctggaagctgcaggcctcccgcactgacttgcaatgttccttgtgctccaggtgctgctgtttctttaagaggaaaaggaagaagactgctcagcgccacaagtgaccagtgcctcccaggagtcctcaggccctggggactctgactcaattgtacctgcagctcctgccatttctcattggaagggactcctctttgggggagggtggatatccaaaccaaaaagaagaaaacagatgcccccagaaggggccagtgcgggcagccagggcctagtgggtcattggccatctccgcctgcctaaggctctgagcaggtcccagagctgctgttcctccactgcttgcccatagggctgcctggttgactctccttcccattgtttacagtgaaggtgtcattcacaaaaactcaaggactgctattctccttcttccccttagtttactcctggtttttaccccaccctcaaccctctccagcataaaacctagtgagctaaaggctttgtctgcagaaggagatcaagaggctgggggtaaggccaagaaggtaggaggaaaatggcagacctgggctggagaagaaccttctccgtatcccaggtgtgcctggcagtatggtttcctcttcctctgtgcctgtgcagcattcatcccagctggccttggggttcaggttccttcttccctccctcctgtgaagttacactgtaggacacaagctgtgagcaatctgcagtctactgtccctgtgtgttggcgttcttagcttttttgacaaactcttttctccaggtagtaggacaatgaaaattgttctaagcaaaggaaagaaaactgactttgttgcacttttagtttttttaaaaaaaacaaaaacaaaaacatggcagatgcatattgtgtctggttatattgggggttttacttttacctgttttgagggggatggggccggccaagccattcagagagaacatgggtccagaggacattctcagtggaaagagtttgatctgcagcacccagaagagaagccaaactcggtgtcattctgagtgaacactcaggttggcaagaaaacatacttgaattttcattcatcttctcagcagctgaagaatgtccctaccagagcatcttgacctaatcagcttacagtttgaaaacctagctctccagaacatgagatgagccagccgagccagactgtgaccaggaaacagctcatcccagagaaggagatgcttaacaaaaaaaaattgaaattgtttcccatgctgccagggacttccaactagatagccatgtgacgtcctggtgacttgggggaaaaattagtgatgaaacagccaccaccatattgccattagtggaaaaaaagaggacagtgaacctgccttccacctgccagagggacctcagggtgtggcattatagggccaggaaaagaaaatcggtgtatcctatctgccccaatagctgagctgtagcatttgggctggcctgccttatcagaaaccaagcttatgaagatcttctcccagcaggtccatagcagtaggcttaggatgcagtatatggggccgcatttaaaaggagggaaagattgtttggtgctggaacattccagggaaaaggagactggaatgaaaggtctgaaattatcttctcaattggactccttccagaaaggtggccgtgcctctaagcatgtttttcccagtatgccctaggcctccccccatggtgttttcatatgaggtactactgtgaaggatctggttcctcattcactgtttgacaagtctttcatgtgtggagttactcttctcatgcccaattttcatttgagtttagtggcttaaccaaacaatgactcctcattccagcggtgacagaagagaaagggtcatttacatcaggaaagaggtcttgtatctgggagtagagagctaaccatggagcacagtggctggtgggtgacttagtctgatggtttgtggaccatagaagtcttcacctctggtttgaggtgcagggctgtcttttgtactggagggtgtggggatattttctgatagttgccatttcttgaaaaattcccttgatgtaccttacacagagcagaaataacattaacatggatcagaggtactgggcttcatctgttccattggaccttggctagggaatatcatttcactggcatcaaacctgcttagcttatgaaaagatggtaatatgtcatttctataaatgtttctatatatgaaacataaagtggcagggagatacaatatcacaccccttccccacaaggactgtgaatattgggatttatgtccttgccattacctagtggttacagccctatcactaaaatttacatcgtttctcagttgggatttgggcattgctaacttactgtatagaaagtttaacttttcctcacccctgtatagaaaatgccttgcctctcaagagagggcagagggggggccaggtgcagtggctcacgcctgtaatcccagcagtttgggaggccaaggcaagtggatcatgtgaggtcaagagttcgagaccagcctggccaacatggtgaaaccccgtctctacaaaaaatacaaaaattagctgggcatggtggcatgctcccgtagtcccagctactcgggaggctgaggcaggagaatcacttgagcctgggaggcagaagttgcagtgagccgagatcgcaccactgcactccagcctgggcaacagagtgagactctgtctaaaaagaaaaaaaaaaaagggcagagggaaatggtgggaatgcctggagcatcctggcactctatactctactgagtgcctctcttcagcccctcaccctgcttccacacacacacacacaaaagcaaaggcactgaccagcttggctgcagggcaagctgccttgcagctggatttgcgactttttttttgtcttaaaatttttactggatcagttgtaggggactgtacttcctaagacactgttctcaccttccaacctcacaaatctcttactagatatttggtttttataacaagggtaaagaatcccaggtccctttagcatgcagagtaatggtgatccctccagagccattggcacttcaaagtggtcccagacctgggagattctggtgggatcttccttaaaaataagcaaaaaacctgagtaccctagatgcaattggccatttgtttcaggcccatcagcgaatcagggctccctcctcaaccctactgctacagttccttagctgtatgcctcagccagatccttggggttagggcatgcactcgctgactgtccccacccatccacttgctctgtagtttctgagctttctccatttcacaagtatggtgcctaacgatctttttctttaggattgatgcagttgtttttcctgaaagctaactcagcatctattcataaaaacccttaatagtatacattaggagttttcccaagctctacagtccctcagacattgcatcctaaacagatttgaggcacacaggccaagactccaccaaggcataaatggtcccccctactcccttttgaccagggtatcacttgtgtctctgcagtaagagttggtcaagttgctctacgcaccttggtgctttccagagatctcactccagactgcccccaagggtggatagagtatcctgacagccagtgtgcactcatgactgccttaattaacattcttctgctattatggagcctgtccagcaataaacagggtctaggaaggtacaagattagcttccagttaaaatcccattttatattggaatgcatgagctacagatgacagcagagatcctgaggtttctagacatgttgattgtctcttttttctaaatgaactccaagtacttagaaaacagtccctgtccatcagccagaaaaggtgaccatcacccctaaagtaatttccaaacttagttcagtgggaagatatgctggtagtgcatattcagtgttgattttcagtgctagtaaccacttttaatgccagaaatatgtaacaatgataatgtaacgtcaaagtggttactaaagattatagccttaacttttttatgtaaaagataaaatccattcctcctcccagtgagcaagcatggcttgcatttctcaaaaatgagaacttccatggcagccaagaaaacgtcttctcagaggaactttcgtttgatgcatctcccaagcccacatgcctcctgtgttccagccacctcttccatttcacatttaaaccagctctccattcccattgagttgccctaacaacattgtctccagtgtcagaaccatattaaggttcgtttctcagattgggagcctgcaacaccatacagccaacattgcctttgccacgccactgccaccatccccaccattgccctatggtgggcagatgaattccagaaaccctcagggagccaggataattaggcaacccatctgaattggccacgtaagtgacaggcacttatctctcgggttcttgcttttgcagactccagggaagtcctgtctagaggtcgatggcagagactcctagtctttcccatgaggggttgataggaatcaaattgggattcctttggctttgggttttgtttttttgttgttgtttttggttttcagtttgttttttggtgtatggggggtgattttgtttctgaataagaaaaagaagaggcaaccatggcccttatgtgggtttatcctttttgagcaatgttttagccacaagtaaggaatcttgaaagtcttttgtccagcaagcagtcttaaaaatgtttttcctaactccttttgcaggtgactaagtacaaaaaaatagttttctcattgtattcaaaatagtgagtaggttccctggataatacacagtggtagttgacatattttctcaaaacacaaccagaaaacccacttccggtatttgtaaatcacctttcaagggaaaaagtgaacacgtattccttgtatttctagtttgattaccaaacctgatgttacaaagaaacctccgttctgtagacagaatttcttttatttttcttcttttactcctcacaatcactttcccagtgccatcaccatctataaggtctcagagcagaggattattcatggtaataagtgggggtgtggtgcagccattccagtaacacccacaagaggacagctgttctgaatgtccccacccacccctctttcagtacaggtgagacattttcagttcatgagctccagaccaaatcccaggccagcccttgcaccaaaagccttttttagaaggcttatcagtctattaggaatgtctcaggaaagatgagccatttctttggggagaaatatatttacagatggaagtgtgtgactgcgtgtctgtgtgtgtgtgtggtgtgtgtgcgcacgtgagtgcgtgtgttcatctatgtgcatttcacttccataaagacccagcccaagctgctgggaaccatgtgttcctgagtattctcagaggttaaacaagtgacaagtgagcttctgaaattagtgtctcagcaagctggctttaggaatgagccccattttatcaagcagagaaaaaaaataacagcagaaaagataaagataaaccaaaaatatataccccccaatggaaaataatgttgattcagcaattcccataggatgtattacatgctctaatttattatattattatttatctgtctttgatctttgcccattgtactcttaaaaagatgttgggatgttgattgcgatttttaaacaactagataatgtataaatcagcagtggaaatcagttttaatgtgtggatgtgtctgattattgttaaatgcctctttttttactttttttttttttagatgtataatgtttcataaaccctggcactggtcacaaagctcagctgtgaaaatgaaatttgtagtatttttaaacatgaatgtcaatttcaagtgtatttgaaatggttcctccaggagagatatttgtgcaccattaggaaaatcttctctgcagaggaagtagccttctttggagaaaatggaaaatgggttctgatatgtgatctcagagtagcccatttcctagggcaccatggaaaacacaaatgtgatctttaagtatacctcttccccagtttggggaggaaaggactcagtttgcaccctttttgtatgtaaaataaaatgtcttacctttcttggctacttctgcttgtttggttggttgattggtttgtctgtttttaatctccctcggctcatttgtaattaacaatctagctaggactaactttgatgcgattcaagactcctgtgaacaaaaataatttggcattcttgtttcattccttggattaaatattgtcttctcctgtgagtcacttcaaaaataaatactgctgtctctcttcgagtgctgaa

SEQ ID NO: 103 - DNA, 28756 bp, Homo sapiens
tcccagacagaacctactatgtgcggcggcagctggggcgggaaggcgggagctgggggcgctgggggcgctgcggccgctgcggccgctgcagccgctgcagcgccagggtccacctggtcggctgcacctgtggaggaggaggtggatttcaggcttcccgtagactggaagaatcggctcaaaaccgcttgcctcgcaggggctgagctggaggcagcgaggccgcccgacgcaggcttccggcgagacatggcagggcaaggatggcagcccggcggcagggcctggcgaggagcgcgagcccgcggccgcagttcccaggcgtctgcgggcgcgagcacgccgcgaccctgcgtgcgccggggcgggggggcggggcctcgcctgcacaaatggggacgaggggggcggggcggccacaatttcgcgccaaacttgaccgcgcgttctgctgtaacgagcgggctcggaggtcctcccgctgctgtcatggttggttcgctaaactgcatcgtcgctgtgtcccagaacatgggcatcggcaagaacggggacctgccctggccaccgctcaggtatctgccgggccggggcgatgggacccaaacgggcgcaggctgcccacggtcggggtggccgactcccggcgagaggatggggccagacttgcggtctgcgctggcaggaagggtgggcccgactggattccccttttctgctgcgcgggaggcccagttgctgatttctgcccggattctgctgcccggtgaggtctttgccctgcggcgccctcgcccagggcaaagtcccagccctggagaaaacacctcacccctacccacagcgctccgtttgtcaggtgccttagagctcgagcccaagggataatgtttcgagtaacgctgtttctctaacttgtaggaatgaattcagatatttccagagaatgaccacaacctcttcagtagaaggtaatgtgggattaagtagggtcttgcttgatgaagtttaccagtgcaaatgttagttaaatggaaagttttccgtgttaatctgggaccttttctcttattatggatctgtatgatctgtatgcagttcccaaggttcatttaccattattaaaaaatttttgtcttagaaattttatgtatgtcaacgcacgagcaaattatcaggcatggggcagaattggcagctgggtggaggcttcggtggaggtgagcactccgaaaggaaaacagagtaggcctttggaacagctgctggaagagataaggcctgaacaagggcagtggagaagagagggtaaaaattttttaaggttacatgaccctggattttggagatctcgaatttaaaggtgatgcaccagggatgaacgctcagattttcagtttgaaagctggcgtgacatgtaaaggagtggagaataatgtaccattgtaatgatgaggcgcctctaggacatctaggataatttcaggcgtggggatctaggtgaattgaactgttggagggaagggaataaccaaggaaaagaatgtgggggttgagagatgccccgtttaaaacctaagagacctggatatttatggttgtaagaggaggcatggcagaggaaatggaaacagtaagaaaggagcagatgctgcatctctttaatgggacagatacaaggcatttgggtttgacacttaggtcactggtagagatgatgacaagagcccgtagctaaagaattgataaaagccagtctcaaaaatcccaatatagtctggtaatgttaatgtttctttggttcagatagctgactctcaaagttattttcctaagaaactgaaccaaaagtggacgctatatgtaaaaagtttttatagaagtgttataagagtaggatagagacataattaaacatgttttaaggtaattgagtggaacattaagcacctatttttaaaagtatgatttaatatcaatctacaaagtacacaaatataatacaattgtatcagacagttgtgacagcactgattagaggctgaacattattctaagtctttaattcccacaacaaccctagaagcaggaactattgttatctctattttatagataaagtaaaccacaaggggttaacacgttttgtcttgtgggtgacaaaatgcattcaacttgagcactttgactcagaatcttttttttttttttttttaagagggagtcttgctctgtcgcccaggctggagtgcagtggcgcgatctccgctcactgcaagctccgcctcccgggttcacaccattcttctgcctcagcctcctgagtagctgggactacagacgcctgccaccacacctggctaattttttgtatttttagtagagacggggtttcaccgtgttagccaggatggtctcgatctcctgacctcgtgatctgcccatcttggcctccccagaatctttactatgtcatacacaattgcaaatgattaaaactaaatattggatataaattggataatgccaaagggaaaaatagttagatttaggtaatgagtgataagtatgaattttggtaagacttttaagttcagttttttaaaggagatctctgccaaaccccaaaaacaaagagccctaacatcagcctaaccagatttcaaatttcatcttttggcggtatgcatttttaacagtcacccctcaactaacacatcatcctccctcaactcacattctactaaccccatcaatgcaactccctgcccaccttactcaacatatacaccgctgctagccccataccccgaaccaaccaaaccccaaagacaccccatacggtttatgtagcttacttcctcaaagcaatacactgaaaatgtttcgacaggctcataccaccccataaacaaataggtttggtcgtagcctattagctcttagtaagattacacatgcaagcatccctgccccggtgagtcaccctctaaatcaccacgatcaaaaggaacaagtatcaagcacgcagcaacgcagctcaaaacgcttagcctagccacacccccacgggagacagcagtgataaacctttagcaataaacgaaagtttaactaagctatactaaccctagggttcgtcaagttcgtgccagccaccgcggtcacacgattaacccaagtcaatagaaaccggcgtaaagagtgttttagatcaattcccctcaataaagctaaaattcacctgagttgtaaaaaactccagttgatacaaaataaactacgaaagtggctttaacgcatctgaacacacaatagctaagacccaaactgggattagataccccactatgcttagccctaaacttcaacagttaaattaacaaaactgctcgccagaacactacgagccacagcttaaaactcaaaggacctggcggtgcttcatatccctctagaggagcctgttctgtaatcgataaaccccgatcaacctcaccacctcttgctcagcctatataccgccatcttcagcaaaccctgacgaaggctgcaaagtaagcgcaagtacccacgtaaagatgttaggtcaaggtgtagcccatgagctggcaagaaatgggctacattttctacttcagaaaactacgataacccttatgaaatttaagggtcgaaggtggatttagcagtaaactaagagtagagtgcgtagttgaacagggccctgaagcgcgtacacaccgcccgtcaccctcctcaagtatacttcaaaggacatttaactaaaacccctgcgcatttatatagaggagataagtcgtaacatggtaagtgtactggaaagtgcacttggacgaaccagagtgtagcttaacataaagcacccaacttacacttaggagatttcaactcaacttgaccactctgagctaaacctagccccaaacccattccaccttactaccaaacaaccttaaccaaaccatttactcaaataaagtataggcgatagaaattgtaaaccggcgcaatagatatagtaccgcaagggaaagatgaaaaattataaccaagcataatatagcaaggactaacccctgtaccttctgcataatgaattaactagaaataactttgcaaagagaaccaaagctaagacccccgaaaccagacgagctacctaagaacagctaaaagagcatacccgtctatgtagcaaaatagtgggaagattcataggtagaggcgacaaacctaccgagtctggtgatagctggttgtccaagatagaatcttagttcaactttaaatttacccacagaaccctccaaatccccctgtaaatttaactgttagtccaaagaggaacagctctttggacactaggaaaaaaccttgtaaagagagtaaaaaatttaatacccatagtaggcctaaaagcagccaccaattaagaaagcgttcaagctcaacacctatcatccgaaaaatcccaaacatatgactgaactccttgcacccaattggaccaatctattaccttatagaagaactaacgttggtataagtaacatgaaagcattctcctccacataagcctacatcagaccaaaatattaaactgacaattaacagcctaatatctacaaccaaccaacaagccattattacccccactgttaacccaacacaggcatgcccacaaggaaaggttaaaaaaagtaaaaggaactcggcaaaccttaccccacctgtttaccaaaaacatcacctctagcattatcagtattagaggcacccctgcccggtgacatatgtttaacggccgcggtaccctaaccgtgcaaaggtagcataatcacttgttccttaaatagggacttgtatgaatggctccacgagggttcagctgtctcttactttcaaccagtgaaattgacctgcccgtgaagagacttttaagttcagttttttaaaggagatccactaaatgtcaggatgtccatcatatctatgcacatagataagtcctcaatgtcatctgtgagttcttggaaactgtgactttaagtgaaacaatgtagagcaaaaccaattttaccataggctactggatgtacacaagagttaagttcctagggcatattgctggtcacaaaaacatcaccaaacttctaaatgaaggccaaaaacacttctaatagaaaacactgaagtaaatatgagctatacatacatttaagaagaataatgtgcatgtctttgggatgtggaaggaaactggaatacctggagaaaccccatgcagacatgggaaaagcatgcagactccacacagacggtggccctggccaggaattgattatttttctcatcaacgttagaagaaaacgatgttattcaaggacatgttgtatataaatacatgaaaatatatgtatattcccaaaatatacttaggctttctttgtgattttataggtaaacagaatctggtgattatgggtaagaagacctggttctccattcctgagaagaatcgacctttaaagggtagaattaatttagttctcagcagagaactcaagtaagtaccttaacataaattcaccacaagaaaatcatgtctcatagtggagatcagtatatgataaaatgaaattgtataaaaggagctattgatgaagctgcttaatatcacaaaggtgattatagaaaattaataagcagttatttatactacatgacaataacttattctactacctgagtaattgatttcatcaccttgaaaagttacattaaacattaaatagctcactgtggtatcagatttgcaagttatcttgaaccatcattcagtaggcccaaatataaattatacagtgtaatcaataacctgtagtttcacataaagtcaaaacaactattttttgggacttgctaaaattaagtgatgatcccctttctggacccaaccctaaatgcaataaaatgtgaattttaggatgggctgaaatgggtcataatcttctactctgttattcctagttaaccacaatacccaataatattttgtacttaacattcattacccagtgtctgaaggtaaaacatttcaaagtattgaaatggttctagagatcctggagagaagcgggtatctccagttagcctctgctaagaattttcctgtcctccaacccagggttggagtcagtagttcatgaagcctggatatgccctggtgactggagagtgggaggggtaatcatattaagactgcccaggaagtcaactccaatggcttgggaggttgaggggtggccagaattggacctgtgttaatccattctcatgttcttataaagaactgcccaagactgggcaatttgtacaggaaagaggtttaattgactcacagttcctcatggctggggaggccacaggaaatttaaaatcatggtggaaggggaagcaaacgcatccttcttcacatggtggcaggaaggagaagtgccgagcaaagggggaaaggccccttataaaaccatcagatctcatgagaacttaactatcacgagaacatcatggggggtaccaccccccataattcatttatctccacctggtatcacccttgacatgtggggattattacaattcaaggtgagattttggcggagacacagccaaaccatatcaggatctaaggggaaggtctgggatctggcatgttaatcattcttagtctaataatataatcaccaaaaagaatgcagtatcctagggcactactttcttgggaacagtagtcatagtattcttttcccatgtgtattggtgaagattcaaccaaagaagcagaaccagtagtagatagatacaggtatattaaagagttttattgcgaggaattggcttacacaattatgggggctgggtacgtgagtccaaaaatctgtaaaacgggccatcagaaaggacaagctggaattctccagcaggggctgaagtggtacaggtgaaatttcttcaggaaagcctcaactctactcttaaagcctttaaactgattgattcagcccactcagattaaagtctgaccgggcacagtggctaacccctgcaatcccagcactttggaaggccaaggcaggtggatcacttgagctcaggagtttgagaccaaccgtgcaacataatgaaaccccgtctctacaaacaaattagccaggcgtggtggcatgtacctgtagtttccaggaggcagaggttgcagtgagccaagatagtaccactgcgctccagcctaggcaacagagtgagatcctgtctcaaaaaaatttaaaaaaaaaactgaattgtaatcacatctacaaaatgccttcaaagcaacacctagatacagtatctgaataaccaaggactatatcctagtcaagtttaacactatgggaaggaaagaactacacagctatataggctaaggggattcaggcttacatagattttctcccaagttcttcctagaatggcataggtaaaaaccgagaagaaagtgtatagaatatttgcattgattgcctctgggcgacggggcagatttgttgatgtgcatcttgctgcctgcttccatcttcatgctgttctttcttctggttgctaggatgctctgattatctctttccttggtagatttcaaattcacagactatatcgccattccaagaaactctttaatgatatttttgaatactactcaagtttgtttatggctagcttaagctcaaacagaaagaaatctcagtgggggagatgttcacttgagccagcatttctcctcgaatatgatgagtgtaatttttttttacgaccttcctgtgatgcatgtaattgggtttggttgcttcttctgtatttatatataacatatgttggtgtcttgtgcttttttttttaaggctgagaaaatttaaagtctttgttatcaagcatgccagggaaatagtgataccagttagtaaaaaatgttagagctcttttttgttgttgttcttccttccacttccttacttgttggtcagtcccacacatatagtgaacagctgctgagtgccaggcactgcagggtcctgaataagagggcagagatttatacatggaaatcacttgcttatgccaactctaaagatacttcatttttcacccctctcccccaatgtaagaagaaactgaatcctcaaagtgatcacaaaattttctaccaaacactatagtaatttagggtaaatatttcttaagtaaggtattgagggaaaatgcttttccaaagttgtctagacagtcaagttgtggctttaaaagaacttgaggtgagaagggtgggaatggccactgatgagtacagaatgttttcttttttggtgtgatggaactgttctaaaagtagataggagtgatgcttgctcgactctgaatctactaaacgtcactgaactatacactttaaaagggtaaatgttatggtgtgtgatttatatcaataaagtggcttttaaaagtctttggaaccagccgggcacagtggctcacatctgtaatcccagcactttgggaggccgaggtgggcagatcacgaggtcaggtgttcgagaccagcctggccaacatagcaaaaccccgtctctactgaaaatacaaaaattagccaggcgtggtggcaagcacctgtaatcccagctactcgggaagctgaggcaggagaagctcttgaaccaggaggcagaagttgcagtgagccaagactataccactgcactccagcctgggcaacagagcaagactccgtctcaaaaaaaaaaaaaaaacctcgttggaaccaaaaattaaataaacaagttttactgtaatgctatagtagcctggacaccatctttagaaaatccaaaattgcctccattatgtaagatttaaatagtctcccatccacgaaagttaacttaatttcatgttataattttttacgatctcactatcagaatctccacagtgattaaaacttcttgaaggtgcagttctctctccccctaccactcacacacttggagtagcaaacactgacctggtttctgatgtctactatggcacctaataactttgtgactttaggcaggttacaagtaagccttgttgaacctctttccttacctattaaatgagatgaataatgacaacttttttgggtgattttgaagactcactgaaattttgtatgtaaagtttctggcacacagaagggtatagatatcagttcctacccccacccccataaacttgctactttatatcttatagaacatacacattaatattaatattaatgaaatcacagtgaacagactcatgatctcattttcaccttaacatattactttgttcttgtttccctccatcttgagacaaaaatccactgccacctaaatcaactctctcatctcccctgacttgattctggattcctttttttctatcttcaccttgctctgctgtcccaaccttttagtattatcaaaggcaaaataaaaattttgcgatgaattctctaaatttaacattgtgtttgggaagaaaaaattgcagtttagggcatacatgcagacaagtgaccttccatatgtctgaagaacaaagggaaggttagaggttttatttaaaaggagaaatgttactgctctttgagaaagttcattggcactactaaggtttgggggagctagcaagctccgactggcgagcagtgagtggtgggcaaaatcagttctagagttgcagcaagttatctcagaagctatagataaaactggtttcaggttacaacaagcagttccagcagtcaggcttacagagaattacattcttggagcaatgttttataccctgagtgcttttttcccctggcccctcaactctgatttagttgggtatgacaagaatgacccactgtcacccaggccagagggcagtggtgtgatcgcggctcactgcagcctccacctccctggctcaagcaattctcctgcctcagcctcccaagtagctgggataacaggcatgtgccaccatgcccagctaatttttgtgttttttagtagaaatggggtttctccatgttggccaggctggtctcaaactcctgacctcaggtgatctgcccacctcagcctcccaaagtgctgggattacaggcgtgagccaccgtgttcggcctaccctgttttaaacctcaccatagtttacttttcttctaccctcaactttctcagagctttcttgtattaaataactttagtatgattaaaataaaattctatactacactttggttgtagtctgtcatgcctgtgcctttgcacatgtttttatctcctttgacactcagttaaggagtcatgccctgaggagtattctccctcatcaccccggccctgcgttcctgtatagcgtcctctgcatgtcttcgttgtatgtcctttcatacattatagtcactgctgagatatttctgactgctatcacaatctctttgagttcagggactgcatattttatctctatccccagaatctagcataacccctagcaaagtaggaattcaaaaatcacagaatgaatagtacataggtgatttataaaaatagaaccatcccacatagtaccactttgtaacccacctctttttccctcaatatattagaaaataaagtcctgtaaatatttttagtggctgcatagtattccattatgaggctggatcatacccaatttttaatatgagcatacctcagagacactgcaggttcagttccagaccactgcaataaataaagcatatcacaatataggtagtcacataaattttttctcagtgcatataaaagttatatttacactatactgatagtctaatagatgtgcaatagtatatctttaaaaaatgtatgtaccttagttaaaatatgactggaaaatgctaacaatcatccgagccttcagtgggtcataatcttctcactatggagtgtcttgccttgatattgatggttgctgactgataaaggtgatgattgctgaaggctggggtggctgtggcaatttcttaaaacaagaatgaagtttgccacattgatagactcttcctttgaagaaagatttttctggagcatgtgatgctattttataggattttacccacaacagaatttctttcaaaatgggaatcagtcctctcaaaccttgctgttgctttattaacttagtttgcatagtattctaaatctttcgtgatcaacaatgttcacagcatcttcactgggagtagatttcatctcaagaagccagtttctttgctcatccataagaagtaattccttatccattgacattttatcatgagattccagcaattccatcccatcttcaggccccactttttttttttttttttttgagacggagtcttgcctgtggcccaggctggagtgcagtggcccgatctcagctcactgcaagctccgcctcccgggttcacaccgttctcctgcctcagcctccctagtagctgggactacaggtgcccgccaccacgcctgctagttttctgtattttttagtagagacagggtctcactgtgttagccaggatggtctccatctcctgacctcgtgatccgtccaccttggcctcccaaagtgctgggattacaggcattagccaccacacccagcccaggttccacttctaattctagttctcttgccatttccaccacatctgcagttatttccacccccaaagtcttaaacccctcaaagccatcatgagggttggaatcaactaactccaaactcctgttaatgttgatattttgatctcctatgaatcatgaatgttgttaatgccatctagaatagtgaatcctttttagaaggttttccattgactttgcccagatccatcagaggctattgcagctacggccttacaaaatgtatttcttaaatagtaagacttgaaagtcaaaattactccttgatccatgggctgcagaatgagcaggaatattttgaaaggaatcttccttcctgagaagtaggtctcaacaggaggctttaaatatttagtgaaccatgctataaacagacgtgctgtcatccaaacttcgttgttccatttctaatacacaggcagagtatatttagcgtaattcttaaaggccctgggattttcagaatggtaaatgagcattggcttccactgaaagtcatcagcttgcattagctcctaacaagagaatcagcctgttctttgaaactttgaaactaggcattgacttctcctttatagctatgaagtcctagatggcatcttccttgaatagcaggctattttgtctccactgaaaatctgttcttagtgtagccaccttcatcaatgatcttagccagatcttctggataaacttgctgcagcttctacattagcacttgctgcttcaccttgcacttttttcttatggagacagctttttccttaaacgtcatgaaccaaacccttgctagtttcaaacttttcttctatagctttctcacctctctcagcctttacagaattaaagagggttaaagccttgttctagattgggctttggcataaggtactgtggctggtttgatctatccagaccactcagcttcctctacatcagcaataaggctgtttgcttttttgtttttgtttttgtttgagacggagtctcgctctttcgcccaggctggagagtgcagtggcgtgatctcagctcactgcaagctccacctcctgggttcacgccattttcctgcctcagccccccaagtagctgggactacaggcacctgccaccatgcctagccaggcatacacttttttgtatttttagtagagacagggtttcactgtgttagccaggatggtctcgatctcctgacctcgtgatccgcccacctcggcctcccaaagtgctgggattacaggcgtgacccaccgcgcctggccaagctgtttgctttcttaccattcacattttcactggaatagcacttccaatttccttcaagagcttttcttttgtatttacaacttggctgttagatgcaagaggcatggcttttggcctgtcttggctttgatgtgcctccttcactaagcataatcatttctagcttttgattttacatgagaaatatgcgactcttcctttcacttgtacgcttagaggccattgtagggttattaattggcctcatttcaatattgttgtgtctcagggaattgggaggccagaagagggggagagaaacaggaatagccagttagtggagctgtcagaacacataacatgtatcgattcaccatcttaaaagggcatgatttatggcaccccataacagttacttgcaacagtaacagcaagatccccaaaacgtattttaataatgaaaaagcctgaaatattgtggaaattaccaaaaggtaacagagatagaaagtgaacacatgctgttggaaaaacttcaccagtagacctgctcagtgcagggttggcacaaaccttcaatttgtaaaaaagaaaaacacctttatatctgtgaagcacagtaaaatgaggtatggcttagtagggaaccccatttttaaaggctcagtatgaagggtcttaaattgaagatgtatttttgcgttctggttaagacactattccatttcagggttttttgtttttaagtggtttcccaacactcctcagggaaattgagcaagaattccatcggcagtcctcacatcaggaacagtgaaaaaggataatgtttatatggcacccgagataatcagataaggccagaagacaagagtcagagggttctgcctaatctaagccccaccatcctgatgtttaagggcccctgaatcggaggaccctgccacaggcaccaactgaagtcttttgtccatgtaacaaattgcagctcaagtttcaaagtcaaatctgttggagttcaactcggaggtccatcatttcccggctgtgtgaccagtagtttcttaaccattcagcctcagtttcctcatctataaaaaggaatgatagtaccacgtacaattgccagttaaatgcagtgtgtacattatctcatttagtcttcatgcaaaccttcaagactcaatcacaaagaaatgtccacacatttcttaacaaagaatacatatgctactacataccaactctcctttgtcagggaatccaatctagattggtttaaaataattataggaaagaaattcagcagtgaaatatgtgactatattggatgcttgctatttgtcatttactgtatttctagcgcttgtgccatgtaagggctgatgaactcaaaccgtagctcagctttttgcatgctcttttttacccacctagaggtccagtgtttcctgtgatacttacctctaaactgctaaatagccacattttacggaagcatattcttcatacctttgctctaacttaaatctctaactttgcactatatttaatatgggttttttggggggaaggggggagtggagttggttttttttgagacagagtctcgctgtctcgcccaggctggagtgcagtggcacaatctcagctcactgcaaactctgtctcctggattcaagcgattctcctgtctgagcctcccaagtacctgagattacaggcacgtgccaccacacccagctaatttttctatttttaatagagacggggtttcactttgttggccaggctggtctggaactcctgacctcccgtgatccgcccatctcagcctcccaaagtgctgggattacaggcgtgagccaccacacctggctaatctgttcttcactttcttttctatactcactacaaaaaagggcaaggaagtcttcacagctgcacttactaacaccgtcacggctctgttttggccatcatctgtttattaactaaactctcttctctcccaactccaaatctttgtttcttctagattgagttctctccctgaagagcctaatccaacctggtccctgtaactgccctgataccttaggagatacctgggcttatttaacttctctctggccaccatgtctttttccagcctgagtcaaagtatattctttgctctaacctaattcttttaagaatgacagagtaaaataagtaaaatttatatgaggagggagagggaggaggcaatcaagagaatgaatagtccctattcttgattaatccttattataactatgagttcaagggcaattatataatcttgttaaagcaccaggctaaaaacttgacatggaattgtaatttctgttgtgtatctaattactatgaaagcctagttctacctgtttcatcatttataaagggaattgcaacccccaccacgaccaacaaagtagtttcagagattgggagggactaagctagtcaatgtaaaccaagcttgtccagcccatggcccgcaggcctcagtgtggcccaggatggctttgaatgctgcccaacacaaattagtaaatttccttaaaacatgcacagatctttttttttttaaagctcatcagctattgttaatgtttgtgtattgtatgtgtggcccaagacaattcttcttccaatgtggccaagagaagccaaaatattggaccacccctgagtaaacactgaaattaattaacttcttcccttttggattttaattacataagtaataataagctcattttttaatacttcacccattcctgtattgtttgaaacataaatcctttccccattcccaaaggtaacaacatattaacagtctgaatgtcattccaagcttttctgcagtcattcaaacatatcactctttttctaatattaggaaaatcttcacacatacagaaagaactttacagtaaactcaccacctagatctaccattaacattttactctactagtttcatcacatttcatccatcaattggtcttgttcatttttgcatttcataataaactgcagacattagtatatttccacctaaatacttcatcattcataccattaatgattcagtcttggccgggtgcggtggctcacgcctgtaatcccagaactctgggaggccaaggcgggcagatcagcaggttaggagattgagaccatcatggctaacacggtgaaaccacgtctcttctaaaaatacaaaaaattagccgggcgtggtggcaggcacctgtagtcccagctactcaggaagctaaggcaggagaatggcatgaacctgggaggcggagcttgcagtgagctgagatcgcgccactgtactccagcctgggctacagagcaagactccgtctcattcataaataaataaataaataaaatgattcagtctttctttacagtttttttctgaagtaaatattacatgagacacacgtcttaaatgtacatttgctaagttttgataaatgtatacacctgtgtaaccccagccctatcaaagatacagaatattacctatcacccccagaaagttctctcctgccctgtccaagttaatctttatcccacccctccagaaataactactattctgatgtttttccaccagagatatcacaagatatcacatggttttatgattcattgtgaaccacagatgtacaaatataggttaaattattggtcagaggccatactgatgttaagtgctttttgttgaaaggattcatatttatgatgattttagttctatagtcactgcatcttagtcagattatttgactagtatggatggattttacaaacattttgtggaattctttttttaaccttagggaacctccacaaggagctcattttctttccagaagtctagatgatgccttaaaacttactgaacaaccagaattagcaaataaagtagacatggtctggatagttggtggcagttctgtttataaggtaagtgtagttgttggtaaataaaaacaaatgttctgttctactttcagcttccttgccatttaaaggaagtggaagaaacaggtataactcattgtctgaacctttaaaaaattaagccatgcgtataggaagcagcacattatctgtactgtaaattatttgttgttagttgaaattatttgttgtttgatactatacaaactaaatagaaatgcaaaaataaatattttagtctgtatcagccttttttatttattcatttatttttgagacagggtcttgctttgtcacccaggctagtgtgcagtggcactgtctcactgtagcctcgagctccaaggcccaagcaatcctcccacctttcctcccaagtagctgggattataggcacacaccatcgtgcccggctaatttttgtatattttgtagagtcaggattttgccatgttgcccaggccggtcttgaactcctgggttcaggcaattcacctcccaatgtgctgggattacaggtgtgaaccaccacacccagcctatttatctttttaattggcaaataattgcatatatatatatatatatatatatatatattatgtacaacatgttgttttgaaatgtgtatacattgtagaatggctaaatggagctaattaacatgtattacccacttattttgtgtggtaagaacacttaaagtctactctcttagcaattttcaagaatacatttgttattaactaaaataatagatgttgtacaatagatctcttgaacttactcctcctatgtaactgaaattttgtatcctgtgaccaacatctccccaataccaatctactttcaaatcaaagaataattgatgtttccaatttaaaatccattctaaatcttttcctgagaattgtacttgcattgcactggtttctactccctgaatgtaccctagatacactgagttatgcctttgtctttcaggatgaatatatctcttactgagaaagggttggggctctcagttgatatacactaactagatgtatatgaatttattacaagtagaaaacttcttcaaccaatttttttttgttttgtttttgtttttttgagatggagtctcactctgtcaagactcagtcgcccaggctggagtgcagtgacacgatcttcggctcactgcaagctccacctgccagattgacgccattctcctgcctcagcctcctgagtagctgggactacaggcgcatgccaccacacctggctaatttttttgtatttttagtagagacggggtttcactgtgttagccaggatggtctcaatctcctgacctgctgatccacgcacctcggcctcccaaagtgttgggattacaggcgtgacccactgcgcccggccaatatacctcttttttaataccaaatgacttccagctttaaaatttttgaggataacaaatagaattctttgccttttaaaacaccaatgaaaaattaacatttatgaggaggaagaaaaatctagtttctgccatgtgggtggtcttgtggtaagatatatacagtgaaattattttagaaagaagaggtaggccgacgcctgtaatcccagcactttgggaggccaaggcgggtggattgcttgaggtcaggatctaaaaaccagctgggccaagatggtgaaactccatctctcctaaaaatacaaaaattagttgtgtgtgggcgcgggcccctgtagtcccagctacttgggaggctgaggtgggaaaatcacttgaacatggggggcagaggttgcagtaagctgagatcgtgccactgcactccagcctgggtaacagagtgagactctgtctcaaaaaaaaaaaaaaaaaaaaaaaaaactctcagtttcttgggctcctgtttctagaacctcttatgttccccatttgtaatagaagaaaagggacattttttcttgatatttttatccaagtatgaatttcttctaagaaaacaagttatttattttgttcagtgcctaccacactttgaatgattcattaccatagtcacttgaaaatgtattctttaagcaatataagtacgtaaatgcctttatataatatgataaatctacatatagataaataggaagtagaaccttcgaatggtatttttacacctgcctcacatcacaacagcttgtagatatcattcaggcttatcttcctatgggccaaatcggacctcccagcctgtttttgtaaagaaagtttcagtggaacacagacccacccattcattcagttctgtctgtggcctgcaaaggtaggaaaccctatggccctcagagcctaaaatatttaccatcactccttttacagaaggtttgccttgtataatcaactttttttttctttttttttgagacggagtttcgctctttttgcccaggctggagcgcaatggtgcagtcttggctcaccgcaacctccgcctcccgggttcaagtgattctcctgcctcagcctcccaagtagctgggattacaggcatgcgccaccacgcccagctaattttgtattttaagtagagatggagtttctccatgttggtcgggctggtctcaaactcctgacttcaggtgatccacctgcctcggcctcccaaagtgctgggattacagacgtaagccactgcagccgacttataatcaactttaatgcagaacttcaccaccacagtcaatctaataatccagacagctcctaagtgactaaggggcaggtaacatagacagcatgtgcaggacaaagggataattcacgccctaggcaggacagagcagaatggctcaagatttcttcacactacttagaacagcatgtcatttaaatcttatgaattatttctggaattttccagttaatattttcagaccacagttgaccatagataacaaactggaaagtgaaactgcagataaggggggagtctgcattccactttttaaatttttggtacagtaagaattagtagagcatctatttggttgtagcaaagataataaatgatttaatataaaatgatatattgaaaataaaaagtgaaatttgttctgtacccttatttggaattttaaaaataaacacttggatttgttgtgtgtgtgtgtgtgtgtgtgtatttttcttttctataaactatttgagatcaagaattactgctttgttagaattgcaattaagacatactttttatgaatgagaattttaatacactcattctagggcaactttttctgtagaaattatcaaccatattttaggcagtagttagaaaagtcatgtacaatataaagccaaatgttaatacaattgttagcaccaagaagcagaaaaattacctatctactagcattgtaattatcttctgagaattggaagcattacaaaattttatgtatatgtattaagtatgctcttggggttttccatagtcaaggtctcattaaattgtactatcttattcatacaagtttatgtaaatttttctatggagagcaactagataatttggggctcttaactctaaacagccaaagggaaaacaataaaagagaatgcttaaattaaaaagttcttgtaagcaaactggaggccagactatatttaaactcagtctctcataattattgataatggttagtgtcattctcaatataactaaggcatactttgcagcaccccagatgaaagaatagtatattttaataatatgctttggcagcaccaagcatatttttaatacctagtataaacttaactaaacataaatcttagagtttctttgtcttttgacacacattaagaaaactgatgttgttttatttcaaaggaagccatgaatcacccaggccatcttaaactatttgtgacaaggatcatgcaagactttgaaagtgacacgttttttccagaaattgatttggagaaatataaacttctgccagagtaagtataaggttattaattagtctgaagcactttggatttcctgcttaagactatagaaaataacatgtcttttcagactacaaattgggttcactgtgtactgctaggatgatgggtgcaccaaaatctcacagatcactactaaagaacttactcatgtaaccaaatacaacctgttccccaaaaacctatggaaataataaattaaaaaaaaaaaaaaaaagcttggcacagtgactcatgcctgtaatcccagcactttgggaggtcgaggcaggggcagatcacctgaggtcaggagttcaagaccagcctggccaacatggtgaaaccccgtctctactaaaaatacaacaaattagctgggcatggtggtgcatgcctgtaatcccagctacttgggaggctcaggcaggagaactgcttgttcctgggaggcagaggtcgtagtaagccaagatcacgccattgcactccagcctgggcgacagagcaagaccgtctcaaaaacaaacaaaaaaaaatattaagtattttaacacctgagcatgtgatgtctttccccttgtttaggtcctatttcgttcagcgatgttttatacctttcagtgttaatttcatacttatgtattctattccttttgatgctattgtaaatggtattttctttagtttcagactgtttattgctagttacagaaatgcaaatgatttttgtttattgatcttgtatcttgcaaccttgctgaactcatttgtaattctgtcaatagattccttaggattttctctatacagtataatgtcatctgcaaatataggtttacttcttcctttttaatctggattttttctttgcctaattgccgtggctagacctgccagtacagtgttgactaaaagatagcaagagcagacttacttatcttgctcctaatcttagaggggaagcttttctctctcatcaagtgcgatttaagctgtgagtgcctttatcacattgaggaagatcccttctgtttccagtttatttagtattttttatcatgagagtattatacattttgtgacatgctttttctgagtctattgagatgatcatgtggtttttgtcttttatactaatattttaatgtactattaatatggtatatcacattgattttcatgttaaactaatgtttctgggataaattctacttggtaatggtatataatcctttttatatgttactgggcttaggttgctagtattttgttgaagatttttgcatttatattcagaagggatgatttatagttttttttgttttaatgccttcccctggttttgttatcaggataaaagtgacctcatagagtgagttaggagatgttctcttcccttctgtttttttgaaagagtttgtgacagattgttagtacttcttaaatgtcttagaaaattttaatagtgaatcgattgagagaggaatacggaaattgctccaaagtggagattctaaacaaggctatgggagaaagcaaaaaactcttccattgcaacatttgatggtcatttgtactttcaggcatgtactaacataacatcataacagcctctttaatggaatggagggaattctctaacgggagacctagagtaagtcagtccttcattctatggagaaaaaggaaacctgtgaagataaagtgaatatactttgtccctggaaaacacattgctcagttctggagcggctttctctccagatctctgtgcgctggggaacttagatttgctttctactgtccaaatataaactttggtcattctccacctcccctatccctttccccacagctactcacttagtttaagtcccgttgtctctatcagttaacctcttgtggttatataggtttctgttcaaacataaagtcttttattaacaccattcttcccgatttaaaaaataaacagactaatatagtgaaatacagatgaaagagagaacttgtgagacaagaagagaataaaattagaatgtggaaggagccacaagtgatgggagccagagcagacggtcatattaataaagtaaggtggttttactttgtgtctgccgtcagctctgtacgtcattgtgcagtcgatttttcaacagcactgtgccagcctatcctctagggctctgctctcattcatcttgcctggaagaaatctttctcagactatttcacactagaccccaaccaaaccagcaggcccagatattttatattggcagttttctacttaatgagccccaaacaggcttttacttctagttaacaatcttctgtgtgaccacatagtcaaagagaagacagattaaaagaggcctgtggaggcagtagttggctccagagctgggacagatgccccttatcagtggacaccttgaagtaggttttggatgggctgatgtttcttcttctgaccctaaaacttcctgtcaggatgctggcatactcgtccacatgactcggatatccctttgctcctgagcctgtgcttcctgtagagtcttgattttaattgtattttggttttttggtttattttttgtttttgagatggagtcttgctccgttgcccaggctggagtgcagtggcacgatcttggctcattgcaacctccacctcccaggttcagcgattctcctgcctcagcctcccaagtagctgggattacaggcacgtgccgccatgcccagctaatttttgtatttttagtagagacagggtttcatcatgttggccaggcttgtctcgaactcctgacctcagatgatccgcccgcctcggcctcagcctcccagagtgctgggattggaggcatgagccaccgcacatggcccaaaaacttcttgatatgttgcttttgtcttatgaactgacaatcttgacacttgagaattttgcacaaaaaatgtatgtagatgttacttttcatgactcattccagagagactaaaattataatagaaaatggttaatagaaacattgcttcttcccctgaaatataaattattccagaaagtatctttttcttttccctataattttgttacattgtatctctgtttttgtttttttttttaccaaaaatgcataatctctaattagtcagcaaaggttaatgtctattattactcagcaatgtattgaatatcatgagacttaaaagtttactgtgttgtccctgcctacaatgagtttaaaaaatagagaaacgaggcgggcggatcacgaggtcaggagatcgagaacatcctggctaacacagtgaaaccccgtctctactaaaaatacaaaaaattagctggatgtggtggcgggtacctgtagtcccagctactcgggaggctgaggcaggagaatggcatgaacccaggaggcggagcttgcagtgagccaagattgcaccactgaactctagcctgggctacagagcgagactccgtctcaaaaaaaaaaaaaaaaaaagagaaatgaaacaaaccaataatactagtaggcaccatttatagaacacttgatgtgttaggcacaatgctacattcttttttggttttgggggatgggggcggagtcctgctctgtcactgaagctggagtgcagtggcgccatcttggctcactgcaacctctgcctcccaggttcaagcaattatcctgcctcagcctcctgagtagctgggattacaggcacccgccaccatgcccgggtaatttttgtatttttattagagacaaggtttccccatgttggccaggctggtttcgaactcctgacctcaagtgatccactcaccttggccttccaaagtgctgggattacaggcgtgagccactgcacctggccaacaatgctacattttttacaaggatgaagactttattgacagccaggctcggaggcatgtcacacagcagaaccagagtgaagcacagtctgattcaagcaggcgttcctgaccacctggagcatactggggtgcagcctgcatagtactgaagaagtaaccaaagattggggttcattggaggctggaagggtcagaagattcctcagtggagaagctgggtttggaaggggagctggagagaacacaggcttaagtgagagttagggaacaggaatagcagatcctaataaaggaattacaatctgccacacattgtggaattagggcagtatagtctccatcaatcaaacagaagcagagaacctgtcactgtccagggcacataatttcagttatgttctaaacagcttcagattgtatttttgtcttttgcttacacaagaaatgtgataccaaatgtaagtcttgcaaaaaattcttaagaaatttcctgttagctgggtgatagagtggaaagatacaagggaaactgctgactggtttttgagagaatgaggaatccaaaggaaacaaaaaaggagaaattacactttttgttttctaactttctatatagtttacagtttttttcttaccatttgcatatgtagtatactagcatgatatttatccaacttgacagtggcttaccattgtgaagaaaaaagggaaaccttttatttgctttatgcactattgatgcatttaaactgagaatcagggaagctgtgtttttaatggacacataatttaattatatattttttcttacagatacccaggtgttctctctgatgtccaggaggagaaaggcattaagtacaaatttgaagtatatgagaagaatgattaatatgaaggtgttttctagtttaagttgttccccctccctctgaaaaaagtatgtatttttacattagaaaaggttttttgttgactttagatctataattatttctaagcaactagtttttattccccactactcttgtctctatcagataccatttatgagacattcttgctataactaagtgcttctccaagaccccaactgagtccccagcacctgctacagtgagctgccattccacacccatcacatgtggcactcttgccagtccttgacattgtcgggcttttcacatgttggtaatatttattaaagatgaagatccacatacccttcaactgagcagtttcactagtggaaataccaaaagcttcctacgtgtatatccagaggtttgtagataaatgttgccaccttgtttgtaacagtgaaaaattgaaaacaacctggaagtccagtgatgggaaaatgagtatgtttctgtcttagattggggaacccaaagcagattgcaagactgaaatttcagtgaaagcagtgtatttgctaggtcataccagaaatcatcaattgaggtacggagaaactgaactgagaaggtaagaaaagcaatttaaagtcagcgagcaggttctcattgataacaagctccatactgctgagatacagggaaatggaggggggaaagctggagtattgatcccgcccccctccttggttgtcagctccctgtcctgtgtgtgggcggaacatagtccagctgctctatagcaagtctcaggtgtttgcagtaagaagctgctggcatgcacgggaacagtgaatgccaaacacttaaagcaattcgatgtttaagtatgtaagttcttttttttttagacagcgtttcgctcttgttgcccaggctagcatgcaatggtgtgacctcggcttactgcaacctccgccttcccagattcaagcgattctcctgcctcaggctcccaagtagctaggaccaggtgcgcgccaccacgcccggctaatttttgtattttgtatttttagtagagatggggtttcaccatgttggtcaggctagtctcgaactcgtgaccgcaagcgattcacccacctcagcctcccaaagtgctgggattaccggcttgagccaccacacccggcacatcttcattctttttatgtagtaaaaagtataaggccacacatggtttatttgaagtattttataatttaaaaaaatacagaagcaggaaaaccaattataagttcaagtgagggatgatggttgcttgaaccaaagggttgcatgtagtaagaaattgtgatttaagatatattttaaagttataagtagcaggatattctgatggagtttgactttggttttgggcccagggagtttcagatgcctttgagaaatgaatgaagtagagagaaaataaaagaaaaaccagccaggcacagtggctcacacctgtaatcccagcgctttgggaggctaaggcaggcagatcacttgagaccagcttgggcaacatggcaaagccccatctctacaaaaaacacaaaaattagctgggcattgtggcgcacacctgtattcccatctagtcaggaagctgagatggaagaattaattgagcccacgagttcaaggctgcagtgagtcgtgattgtgccactgcactccagccggggtgacagaagagaccttgtctcgaaaaggaatctgaaaacaatggaaccatgccttcataattctagaaagttattttcaactgataaatctatattcacccaaataatcaagggtgaaggtaaaataatacatttttagacaagcaaagactcaggggttacctccatgtgccctttttagggaagctgttggagaaaatactccagcaaaatgaaggagtacacaaaccagagaatgacatgaatccagcaaataggatccaacacaggcaatattccagctatggagctagctttaaaaaggaacagtaaaaatattaatcggttagctgggtggaatggcccatgcctgtagtcccagctactcaggaggctcagcagcaggacgacttgagcccaagagttccagaccagcctggccaccttagtgagatcccttctcttaaaaataataacttattgccagatttggggcatttggaaagaagttcattgaagataaagcaaaagtaaaaaaaaaaaaaaaaaaaacaaggggaaagggttggttaggcaatcattctagggcagaaagaagtacaggataggaagagcataatacactgtttttctcaacaaggagcagtatgtacacagtcataatgatgtgactgcttagcccctaaatatggtaactactctgggacaatatgggaggaaaagtgaagattgtgatggtgtaagagctaaatcctcatctgtcatatccagaaatcactatataatatataataatgaaatgactaagttatgtgaggaaaaaaacagaagacattgctaaaagagttaaaagtcattgctctggagaattaggagggatggggcaggggactgttaggatgcattataaactgaaaagcctttttaaaattttatgtattaatatatgcattcacttgaaaaactaaaaaaaaacaataatttggaaaaacccatgaaggtaactaacggaaggaaaaactaagagaatgaaaagtatttgcctctggaaagaacaactggcaggactgttgttttcattgtaagacttttggagccatttaattgtacttaaccattttcatctatttctttaataagaacaattccatcttaataaagagttacacttgttaataagt

SEQ ID NO: 104 - DNA, 29725 bp, Homo sapiens
ctctgtttacgaatgtttgggcgcgaattactctaagcgcggctctcagaagggtgcaagaagaatcagtggtgagtcgtgatatccttaaccggctgggtggatctaaagttcagggatgagttttaaagccaacgcgtttgtggcagactccgcagtttgcatttgaggatagcgaggggggattgcttacggggaaatgcccgatgtcctaaaagatctgcccttaggatcctgagattgagatgtttgattaggggggagggagcaaagccatgaatacttcctatttctcccgaatcatcctcatggctcatcctcattgctaaatttctcccgcgggcactagtgaagtcaagtgcagccttggacattagtgtctgtgtttctccaggagtcctactcactcttgtgcccacatagaggtctaaattgaggtaattgagtcccatgagtatcaacaagctggtaagaaaaacaagacaacctagaatgcctccctctctcctaaagcatatagtctggcggcaaactactgtaccagccttatttcttttcacttctcctatacacattaaaagcctcgctggattatcctgtccctgaacacgccaggttttttgtgttttttccgagctttcctgccgtccgagttttactgttttcccttggatgcttcatttttctactttttggctaaatatttcaaaatgttattagaataatactttttctatgaataatgtacaaacatacttccgagatattgcggggtcggttccagaccaataaagcctgtcacacgatttttttggtttcccagtgcatataacagttgtatttacactgtattgtaacctattaagtgtgcaatagcattatgtgtaaaaaaaaattacatgctgtaattttaaaatattttattgctaaaaaatgctactaatcatctcagccttcagcaagtcctaatctttttgctggtggagggtcttgcttgatgttgatggctgttgaccaatcagggtgatggttgctgaagattggagttgctgtggcagtttcttaaaataacaaaataatgaattttgtacagcagttgactcttccattcactaaagatttctctgtagcatgtgatgctgtttgaaagcattttacccactgtagaacttctttcaaaattagagtaaatcctcttaacccctaccattgctttagcaactaaggttttgtgatattctgaattctttgttgatatttcaagaatattcacagcatcttcaccaggggtagattccatctcaagaacttcgctcattcataagaagcaacttcttttccactagttttatcatgagattgcagcaattcaggtacatcttcaggctccactatttctcttgctattgccaccagatctttcatcacttcctccactgaagtcttgaacaaagtcatgacctttacaaagtcatccatgagggttggaatcaactttttccagactcctgttaatgttgatattttgacctcctcccgtgaatcatgaatgttcttactagcatttgggatggtgaatcatttccagaagttttcaatttattttgcccagatccatcagaggaatcactgtctagggcagctatagctttacaaaatgtatttcttaaataatataacttgaaagtcaaaattattctttgattcatgggctgcagaatggatgttgtgttagcagacatgaaaacagcattaatctccttgtacatctctatcagagctcttgggtgaccaagtacgtggtcattgagcagtattattttgaaaggaatctttttgtgagctgtaggtctcaaagatgggcttaaaatactcagtaaaccgtgctgtaaacagatgtgctgtcactcatgctttgttcttccatttccagagcacagacagagtagatttaaaagaataagagccctaggatatttcagaatggtcaatgagcattggcttcaagtcaccacccatattagcccctacaagagagtcagcctgtcttttgaagctttgaagccaggcaatgacttctttctagatatgaaagtcctagatagcatcttccaatagaaggctgttttgtcttcattgaaaatctgttgtttagtgtagccccttcatcaattatcttacctagaactggataacttgctgcagcttctgcatcagcacttgctgcttcactttgtactttcatgttatgcagatagcttacttccttaaacctcaggaaccaagctctgctagcttcaggctcttttgctacagctttctcacctctctcagctttcatagaattgaagtgagttaagaccttgccatgaattcgtctttggtttaagggcgtgttgtggctagtttgatcttcaatcccggaccactcaaactttctccctatcagtaataaggctgtttttgctttcttatcattcatgtcttcactggaatagcactttaaatttccttcaagaacttttcctttgcattcacagcttggctaactggtgtagtttccagcctatcttggcttttgacatgcctacctcaccttgcttaaacatttctagcttttaatttaaagtgagagaggtgtgatttttgctttcacttgaacacttagaggccattgtagggttattaaatggcctaatttcaatatcattgtgtctcagggaatagggaggcctaaggagagggagagaggcagggaacagccagttggtggagcagtcaaaacacaacgcaacatttacctattaagttctctgtctgatattggcatggttcatggtgccctaaaacaattacagagtaacatcaatcaccataacagatataataatgaaaaggtttgaaatattgtgagagttatcaaaatatgacacagaaatgtgaagagtgagcacaatctgttggaaaaatggcatcaatatagttgttcagtgcaggcttgccacaaacctttagtttgtaagacaacaacaacaaaatacagtgtctgcgaggctcaataaagtgaaacacaataaaaagagttatgcctgtacattcttacccatagcacaaaccagtttaagacagtcattcgctcacttgcctctttataacatttataaatacacatagtaattattttcatatctgtctctacctgtgcactatcactaagctgtggtttcccttggatctaagaatgggacaaaatacctattcatttttatatgcactgtgagtagcccagaagtgatagaaacaatgtcttttgtttattggattcttactatgtctcaaataccgttctaggtggtttatatattctttgttacatcatttttgctttacaaaagcctttaatgttagtacttttattaatcgttttactaatggggaaaatgagttaatttactggcccaaagatatacagttaattaagtggcagggctagatttggagcttgaacaatttaccctcgttgcaggactgctcttaaccattatggtagtgttctcaacctgggttgattttgacccaggagacatttggcaatgtctggaaacaattttgattggctctactcaggggttggaagtattctagcatctgacggtctacgtagacccaagcatgctgctaaacatcctacaatacacaccacagtctccacaacaaagaatgatccatctaaaatgttaatagtgctgaggttgagaaactttgtgctatagtctagtgcctcaagtaggtttcattgttaacagtacttctcaaactctgttagaccagttttgctttttatttctaatcagtcataactgatacttttgtaaaatgcaattaaaaatcaattattagtcaaactcccttgtggtataataccaggagtgaactctgatgtaaacaatggattttgggtaatatgatgtgtcaacaattacagcaaatgtaccagtttggtgtgtgatgttaatactagaggttgcagggaatggggaagggcagggattatataagaagtttctgtatgttttgctcaattttctgtaaacctaaaactgttctgaaaaaagtcttttttaaaaaaatactaattactagaaaatgatatggcaaagacaaggctaattattttatgataaggttcaatgtgcataaaattactctatcaaattgctacaaaagtttctaaatgattaccttcaatttccacacttgattatggcaaacagtttgaatgagatttggagtagcgctaaattacatgttattttaataaagaatatcaagaagaaaatgattaatggacccaagctataaataagtaccaaatgagacagagcaaaagagccacagacttagagagaaatgaagtagaatagttaggaagattttgaaaagaaggtggctcatgatctgagagggtgggcagagacagaagagagctgctcaggtagaaggtacagtgtatgtttgggaggcagaattactcaaagtgtgttcaggaaatcatcaaatctagctagagagggagatttgattaaggagtagtaggagagaagtatgaaaaggtaggcagagttaggttggtaaggactaaaaatggcatggtaaagagtttgaatgttacacagaacgtattggggtaaattttttactcaattaatttgttccaaaatttgggattgggagggactaggcagggcttgctcatgtcttgtccacacagtgtgggctgcagcatattgacttaggtacatgtaccagactggccagttggtgctggctcttggctgggagctcagctaagactttcctggggtttcagttcctctcggtgttggccttcctcctatggtggtggctgggttataagagcaagtgttggccgggctcagtggctcacgcctgtaatctcagcgctttgggagaccgaggcaggaggatcacttgaggtcaggagttcgagaccggcctgaacaacatggtgaaaccccgtctctactaaaaatacagaaaattagctgggcgtggtggggggtgcctgtagtcccagctacttggaaggctgaggcaggagaatcgcttaaacctgggaggcagaggttgcagcagtgagccgagatcgcaccactgcactccagcccaagcgacagtgcaagacttcttaaaaaaaaagcaagtgtttctaagcaagaagaagtcaaagttgccagtctcttcatgtctaagccagtaagctagaacagaatcacttctactatattctactgctcaaacagcttcagagtctgccaagatttaagacaagggaacatagaccttactgctcattaacaatcatgagaaggaatgtgtaccatttttaatctaaaatctcagctgttacttgtcccttcacctggatgctcttattcagtgaacaacttgaactattgtacatgtcagcccttccaggagagatctacaagtgaaattctgtcatgtggatgggtttttaagtaggggaagtataagggtgtagatgtaaagttgaggtaattaggcattttagaaattgaacacaagatagagaatgagtgtttggtaaggtatcacattgttcaagagcagggtaaagtgatattttgacttccactgctttttgtaactggtgtgatatgtggttgctaaatgtagtttgtgatctttctgttaattctttcccaattttttttccagtcttgtgtggaggggagtttgaagcttttaacgtttgagaggatagatttatcattgtctttctctaaatctgcacatatatttaaactgtatcagtataataattctgaatgtttagaaaataaatgatgaataatttatctgtatatctagctatggctaatatgtgtatatgtttatatgtgtatatatatattttctaggcatatatagctaatatgtgcatatacatatttccttgtatactgcacctaacttctatccacttcttatggtgtaatgcaagaataagtatttcattcttctgttccttttatcagaaattagtttggtaataaaagagggaaaattactctaaattttatcaacatccccatttccaatcccatgtctgttttgtaatttgtgggagggcagggtattcagtacatttctgtactcttgttaaaatgcacatagcccagataggattgcagtttaaattcttaatagtgtcagactaacacatgaatttccacatagattgatggtataatcctaaaaagtgtctccttccatttttggcaaaaattgggtaatggtaaatttattacttaaaataacaagacctaggctttactccttgaactgacattatctgtgactactttatatttctatttccttggacttaaacatggagaggatgttatcatacgatagagtataaaataagagatacaaaagcatttttaaatgattttctaaaatccatacaaacggaagttaatttctaggaatgaaattgaattagatatccttattctgataagagtgaaaattatttcttttaaaaaatgcttgtttaaaagcatacaatactatccccaaacttttattatgatttttctttaaaaaaaaaaaaaaagagaatgtggaacatttacaggatagttttttaaacaaaacattgtgcaaggctttagctttttttgtattattttcatctttacagatttttttttttttcgaagcactgtgtttagatcaagatgtctggtaaagcaaatgcttccaagaaaaacgctcaacagttaaaaagaaatccaaagagaaaaaaggataatgaggaagttgtgttgtcagagaataaggtaatgaaaatatcaagtttctcatttagaaatcttcaactgtggccaagcactatggctcatgcctgtaatcccagcactttgggaggccgaggtgggtggatcacgaggtcaggagatcgaaaccatcctggctaacatgatgaaaccccgtctctacttaaaaaaaacaaaaaaaaaaatacaaaaaattagccaggcgtggtggtgcacacctgtaatctcagctactcgggaggaggttgaagcagcagaattgcttgaacccgggaggcagaggttgcagtgaaccgagtttgtgccactgcactccagcctgggcaaaaagagtgagactccgtctcaaaaaaaaaaaaaaaaaaaaaaaagtttcaggttttaccctactcattaggcaatgcctatatttgtatataacattatttcttaggcaaagtgagtaataattcatttaaaacattctttgacactgtataaaattctgttattatcatcattgtcaagaattgctttagtatgtcctctctgtgataaatatacaccatttttctttagaagtagcaacatacattttttctatgtactagaaattatatgaatactctttgacatatataaaaatctattgtaaaagcaggatccttttatctgatgtttaattctgtttatgtttatgcatgtgtttttccctctaggttagaaacacagtgaaaaaaaataaaaatcatctgaaagatctgtcttctgaaggtatttcttttctattaccttgtttaacctgcttctatatcaagctatatctacattcgtgaaaaaatgttcagcatcttgtttatgagttctgcaaaagatagtaataaacaactacatttgcatttttgtaagaatatgtagtagtggttagttattttggtcaactgaaattttacttagcacctctgacgaaatactgtagaggcttcaatgccactgagttgataggaaatagagaaactcaaagtggcccacagcctgaattattagtgatctgtgatataaatacaaatgtactaatttttcttcaagacaaatatgctttctgttctgtatagattagtttggaaccattattataagtttgtttggagtaaactagtttagagtagttgcctttgcttaaacatcactgtttcatggaaggattctctacgtctcctcagccaacactaggttaggtcctctggttttatactgccatagtgtacaatacttttttttccttttgtatgctttgcacacctataatttgttcaatatcccttctctccaacactcattttcatgagatccagtactatttcttcttttttttaatacctaataagtagaacagtaccaacagcatagttgacactatctatttgtggtttgattagtctgttttgttccagttgccatccaacatttggaaaatagtttcctggtcctctcaatgaaatgtttaaagaatttaggccatttctgagaatgaaacttttcataattaaagtttgattcttcatttaaaattatttctattatcacttggtagtatttctgttaacttatcaatagaaagcatattcatattcaacacctgggatgttacagctgtgtgataaaaagtaaattaaacagtttatacagctttataatattttgttctgataatttcataagcttttttagatgaaaacattccatttttaagcaaaaacatgtaaaacatctagattgatcagagcctcttctattactaacgacaggacaaacaaagcacactaacctaaaacacggaaagacagcagccagcaagagaaaaacctggcaacctctgtcaaagagtaccagagaccatttgcaaactatgatggaatcagtaataatgtgagtataaaattgttccatttcattcttttggttcccatttaggtgtttcctatggatattattcttttaaatattgctatctattttaaggtaatagagtatatttctatttcggaagcagataaaattaatgtgacggtatttgccttcagcagaaaagtctttgttaattttagaaacctgaaattccatcggtgaaataaaagcaagtgtttgtggcctgacttgctatcaataaaattttaatttttgtcaatagagattctttaggaagaagttgagttcaaagtgacactttacatagaagctaccacactggaggggatacagagaaaataagacagaattctgccattgtggagcaaattctatcagaagagccaggcatgtaacttattacaatacagtgtggcaaaatatatatataagaagaattttttcattgtacttctgtttaaagtgtctttaatatgaaaggaaaagtgattgattttgcctggctagtggggaggggtacttgagagaaatcagagagaaaaagtacaaagagtatatgatttgtgcatcagactactatttattccatctttttttcttttctaggacaattttgagtaacagtattaaagaaaaagaagaaatacaataccatctcaacttcctgaagaaaaggtaatactattgcataattaaaatgattaaaacataatttttaaaaacctgacttctttctatgttgccaaatagacacttgtggaatgtaagtttttctttttttttagagaaggtgaacaacttggaagtatgttttctcttttttctaaactgctgctccacatgtttctcaaataagtttcaggggaacttacaaaaaaaaccctgaaaatcacgaaattctgtttccacagttcactcttccatatcagaatttgaaaacagttttgtcaacttgaactcccttcaacttcatttttaataatttgaagttaatagttcacaactcttatctatctgatatttaccctattgctgtgtttttccacttcatattgtcttaaattatttgcatgagcaacaagtataattttctaagatattattgctcttcatcttatggtaaatcaccaatggagatttcttctcaggagttcttaaaaggcacaccactgcctgtgattttcaataattacttttctctagtatttacacaactttttctttttataagaaactaagcttcataagtgaaggagaaataaaatcctttacagacaagcaaatgctgagagattttgtcaccaccaggcctgccctaaaagagcttctgaaggaagcactaaacatggaaaggaaaaaccggtaccagccactgcaaaaacatgccaaattgtaaagaccatcgatgctaggaagaaactgcatcaactaacgagcaaaataaccagctaatatcataatgacaggatcaaattcacacataacaatattaaccttaaatgtaaatgggctaaatgctccagttaaaagacacagactggcaaattggatagagtcaaaacccatcagtgtgctgtattcaggagacccatctcatgtgcagagatacgcataggctcaaaatacagggatggagaaagatctaccaagcaaatggaaaacaaaaaaaggcaggggttgcaatcctagtctctgataaaacagactttaaaccaacaaagatcaaaagagacaaagaagaccgttaataatagtaaagggatcaattcaacaagaagagctaactatcctaaacatatatgcacctaatacaggagcacccagattcataaagcaagtccttagagacctacaaagagacttaggctcccacataataataatgggagactttaacaccccactgtcaacactagacagaccaatgagacagaaaattaacaaggatatacagtaattgaactcagctctgcaccaagcagacctaatagacatctaaagaactctccaccccaatcaacagaatatatattcttctaagcaccacattgcacttattccaaaattgaccacatagttggaagtgaagcactcctcagcaaatgcaaaagaacagaaattataacaaactgtctctcagaccacagtgcaatcaaactagaactcaggattaagaaactcactcaaaaccactcaactacatggaaactgaacaacctgctcctgaatgactactgggtacataacgaaatgaaggcagaaataaagatgttctttgaaaccaacgagaacaaagacacaacataccagaatctctgcgacacatttaaagcagtgtgtagagggaaatttatagcactaaatgcccacaagagaaagcaggaaaaattgacaccctaacatcacaattaaaagaactagagaagcaagagcaaacactttcaaaagctagcagaaggcaagaaataactaagatcagagcagaactaaaggagatagagacacaaaaaacccttcaaaaaatcagtgaatccaggagctgattttttgaaaagatcaacaaaattgatagaccactagcaagactaataagaaaagagagaagaatcaaatagatgcaataaaaaactgataaaagggatatcaccactgatcccacagagatacaaactaccatcagagaatactataaacacctctacgcaaataaaatagaaaatctagaagaaatggataaattcctggacacatacacctcccaagactaaacagggaagaagttgaatccctgaatagaccaataacaggctctgaaatggaggcaataattaatagcctaccaaccaaaaaaagtccaggaccagacagattcacagccgaattctaccagagatacaaggaggagctggaaccattccttctgaaactattccaatcaatagaaaaagagggaattttagaccgatatccctgatgaacattgatgcagaaatcctcaataaaatactggcaaaccaaatccagcagcacatcaaaaagcttatccaccatgatcaagtgggcttcatccctgggatgcaagtctggttcaacatcaataaacgtaatccagcatataaaccaaaccaaaaacaaaaaccacatgattatctcactagatgcagaaaaggcctttgacaaaattcaacaacccttcatgctaaaaactctaaataaattaggtattgaggggatgtatctgaaaataataagagctttttatgacaaatccacagccaatgtcatactgaatgggcaaaaactggaagcattccctttgaaaactggcacaagacagggatgccctctctcaccaatcctattcaacatagtgttggaagttctggccagggcaatcaggcaggagaaagaaataaagggtattcaattaggaaaagaggaagtcaaattgtccctgtttgcagatgacatgattgtatatctagaaaaccccattgtctcagcccaaaatctccttaagctgataagcaacttcagcaaaatctcaggatacaaaatcaatgtgcaaaaatcacaagcattcttatacaccaataacagacaaacagagagccaaatcatgagtgaactcccattcacaattgcttcaaagagaataaaatacctaggaatccaccttacaagggacgtgaaggacctcttcaaggagaactacaaaccactgctcaacgaaataaaagaggatacaaacaaatggaagaacattccatgctcatggatgggaagaatcaatatcgtgaaaatggccatactgcccaaggtaatttatagattcagtgccatccccatcaagctaccaatgactttcttcacagaattggaaaaaaaaaactaaagttcatatggaaccaaaaaagggcccgcattgccaagacaatcctaagcaaaaagaacaaagctggaggcatcacactacctgacttcaaactatataaaaaggctatagtaaacaaaacaccatggtactggtaccaaaacagagatagagaccaatggaacagaacagagccctcagaaataataccacacatctacaaccatctgatctttgacaaacctgacaaaaacaagcaatggggaaaggattcctatttaataaatggtgctgggaaaactggctagccatatgtagaaagctgaaactggatcccttccttataccttatacaaaaattaattcaaggtggattaaagacttaaatgttagaactaaaaccataaaaaccctagaagaaaacataggcaataccattcaggacataggcatgggcaaggatttcatgtccgaaacaccaaaagcaatgacaacaaaagccaaaattgacaaatgggatctaattaaactaaagagcttctgcacatcaaaagaaactaccatcagagtgaacaggcatcctacagaatgggagaaaatttttgcaatctactcatctgacaaagggctaatatccagaatctacaatgaactcaaacaaatttacaagaaaaaaacaaccctatcacaaagtgggcaaaggatatgaacagacacttctcaaaagaagacatttatgcagccaacagacacatgaaaaaatgttcatcatcactggccatcagagaaacgcaaatcaaaaccacaatgagataccatctcacaccagttagaatggcgatcattaaaaagtcaggaaacaacaggtgctggagaggacatgcagaaataggaacacttttacactgttggtgggactgtaaactagttcaaccattgtggaagacagtgtggcgattcctcaaggatctagaactagaaataccatttgatctagccatcccattactgggtatatactcaaaggattataagtcatgctactataaagacacatgaacatgtgtgtttactgcggcactattcacaatagcaaagacttggaaccaacccaaatgtccatcaatgatagactggattaagaaaatgtggcacatatacaccatggaatactatgcagccataagaaaggatgagttcatgtcctttgtagggacatggatgaagctggaaaccatcattctcagcaaactatcacaaggatgaaaaaccaaacaccgcatattctcactcataggtgtgaattgaacaatgagaacacctgggcacaggaaggggatcatcacacaccggggcctgtcatggggtggggggagggggagggatagaattaggagatatacctaatgctaaatgagttaatgggtacagcacaccacatggcacatgtatacatatgtaacaaacctgcacagttgtgcacatgtaccctagaacttaaagtataataaaaaaaaaaaaaagaaaatgttctgtttctcagtttcaagtttgcctagaaatatttgtgacctattttaaggaattcttttgagtacaaattctatttagtttttctttaaatataattttcaacccacaatagccaagtagaaagagtgaatcagatgggttgggtcagggtgggagtttgctgagaaaggtttaacaaattaaaaactgctagaagcaggcttgtaaattgcttaaaggtatagcagcctattattaaagaaggaagaagatattaaaaagataataagctaatacaagtataatgaaaatgtagctgtttaggatctttttaatatagaacaaatactaatgtttagtttatgaatgtgactattacataatagttgctgttcatagtgatcaccttggttcattggaaaagattatattcaacagataggcagtctctttgtcatgtaacagctatggagtacatacatttcaaggcctgactatttcctccttatttttactttcacagcttgctttctttagttcctgaagtcaccatacccaagatacagttacttctaccaatacaacaaagtacaacattagcaaactgatcctaattggaactctaaatacatttttctgtagcagtgtttctgaaagtatatttgaaacacttgttcttacagatagtctatggataaaagtaacctatggtgaattatatttgggtaccttagcatgtaagaagccctgcagtaaataaatctatttcattttctttaagctagcatctcccaaattgctatttctgggaactcattttcatataaatctatttcattttctttaacctagcatctcccaaattgatatttctgggaagtcattttcatatattagtctcatctctgcttttgactaaacgttagcttcattattttcattttttagttttcagttcttactagattacagctatagtcataggcagcttcctgtgtatatcattttagcctggcgaagaaagaggaaaaagacgattcttaccccttagcttcagttagaaaattctaggagatggtttctgatttgctgagcttaggtgatatacacctattcttggcgtgattttgtgacaagagctaccatggatatgattgatatagactggattatatacctagccccatgattacacagacaagtttgctaggcaaacaaaactattcgccattacaattctaaaggaacatacttccagaaagtctgccctatagaaacaatgttataagtggtgattaaatgttgctgatataataggatatattcaagccatggttttagtttctaagagttagtgagactcttggaaatctaactgctatttagaacatttggagcagtgaatgactcttccacataattggtttaataaacatatagaagaaacttcataattaaaatatttttgttaagaaaataaaaaacttattcctcttaggaaagcttaggcagatagtttgtgtttaaatgtgatagcctaatgatgatttttctaaataactagagtttgtcttaacagtttaatgagaattatgatttgtggggtttttgctgcctacttttttctttacaaaaattaaaattttatttgcaaacaatgcatcaaacaaaggtctgtatcaagactctattagaaacttaaacaaattagcaagcaaaaaaccaacaatcctattaaaaagtgggcaaaggacatgaacagacacttttcaaaagaaaacatacatgcggccaacaaacatgaaaaaaatgctctcaacatcactaattactagagaaatgcaaatgaaaaccacaatgagataccatcttaaaccagtcaaaatggctgttattaaaaagtcaaaaagtaacagatgctgggaggttgccaagaaaagggaatgcttataaacttctagtgggaatgtaaattagttcaaccattgtggaaagcagtttggcagattctcaacttaaaacagaactaccatccaacccagcaatcccattagtgggtatatacctgaaggaatataaattgttataaagacacatgcacacttatgtttaccacagaactattcacaattgcaaagacatagaatcaacctaaaggcctatcagtggtagattagataaagaaaatgtagtacatataaaacttggaatgctatgcagccataaaagaatgagatcatgtcctttgcagcaacacggttggagctagaggtcattatcctaagcaaactaacacaggaacagaaaaccacatagtgcattttctcacaagtgggagctaaacattgaatatatatggacacaaagaagggaacaaagataccagggcctacttgcgggaggagagtgagggttgagaaactacctatcaggtactatgcttattacctgggtgaaaaaataatctgtacaccaaagccccacaacatttgcctacataacctgcatatgtattcctgaatctaaaataaaagatttttttttaattaagatttttaaccagatcccaaaagtgggatagtgggttccactattgttcagatttcttcaaatcttaagtagtagaactttttagaacccaaagatactgctgttataaagggaatcaaatttagcttttcctcctcataaaattcaagaatcaaatctgggaaagctattttgcagtctgccagatgtgatgatagaaatagatgtttctactggtgatcaactcaaatttgtaaaagaattttttaactttaatattaaatgccattcatgtttatagaatttttgagcaatgcactttgatcttagtgttttatttgccttaaactctatagaactcagttttctttgaaatcatttagaataactaatgtaaatcttctctatttttgatcacattctctaaaataattgagatttggggtccagggtcatagttaagacttctagactagtgttctgtctctcaaccaataattcacaatgtataatagactcatgtagtgtaatagtctagaaaacatctggatgataaaaggaaattttggttttaaaatgtatataaattgtcaaatgtgtaagatagaaaatttgcttttagtaaagtagccccagtgtcccttaatttgaggtaaatcttaataaattgaaaggctaaatgatgatttgtcagggcttttagagggggagatttactggcaatgttacccagtggtaataaaagaatattgtacccttaagaatatgaggacaagaaaaaatgaggactgttttaaaataataatagtactcaaaaataaacaaaataattgtttttattttatccttaagattgctacaacagtgtgaaactctgaaagtccctcccaaaaagatggaagatttaactaatgtatcaagtctactgaatatggaaagggcacgagacaaagctaatgaagaaggtctggcattactacaggtatgaaatttgaatagggaatccataattagagagttagggaaagggaagaagaccaaagtttttaaaattatcatgatgttcttccagtagtgaatactagatcttgaaccaggttttttcattaaattgtttttttgttgttgttttcattaaagcaaaaatttgtctgaacttggcacctctaaagttgaagtatttctaatatatttgtggttaagtagtgtgtccggaattggtgggttcttggtctcactgacttcaagaatgaagctgcggaccctcgtggtgagtgttacagttcttaaaggtgacgtgtctggaatttgttcctcccggtgggtttctggtctcactggctcaggagtgaagctgcagaccttcgcggtgagtgttacagctcataaaggcagtgtggacccaaagagtgagcagtagcaagatttattgcaaagagcgaaagaacaaagcttccacagcatggaaggggacccgagagggttgccactgctggctcaggcagcctgcttttattatcttaactggccccacccacatcctgctgattggtagagccgagtggtctgttttgacagggcgctgattggtgtatttacaatccctgagctagacacaaaggttctccacgtccccaccagactcaggagcccagttggcttcacccagtggagcccacactggggctgcaggtggagctgcctgccagtcccacaccgtgtgccagcactcctcagcccttgggtggtcgatgggactgggcgccatggagcagggggcagcactcatcggggaggcttgggctgcacaggagcccacggaggagggaggctcaggcatggcgggctgcaggtcctgagccctgccccacagggaggcagctaaggcccggcgacaaattgagcgcagggccggtgggccggcactgctgggggacccagtacaccccccgcagccgctggcttgggtgctaagcccttcattgcctggggctggcagggccagccagctgctccgagtgtggggcctgccaagcccacacccaccggaactccagctggcccgcaagcaccgcgcgcagccccggttcccgctcgcacctctccctccacacctccctgcaagctgagggagccagctccggccttggccagcccagaaaggggctcccacagtgcagcggtgggctgaagggctcctcaagtgccaccaaagtgggagcccaggcagaggaggcgccgagagtgagcgagggctgcaagggctgccagcacgctgtcacctctcaatcccccctctaaacaggacatcccaactgctgttgggaatttgcctgatgaccactctagctacttcctgctggatggggcgatgaaggggccctggagttgtagtgtcctccagaggggaggtctctaggccagggaaagtgccagtgggtcggtccaggggtcctcagtagaagttgttagttgaactcctttgggattctatttgtaagaccatctgtagcttgatggcctcgatttactcagtgataggcaatggtctcactgctcggcgattggcgatggtctcaccgctcggcgattgtctcaccgcttggcgataggcgaaggtccctttgtggtcgccaaaatgtgtctggagttggtgggttcttggtctcactgacttcaagaatgaagccacagaccctcgtggtgagtgttacagttcttaaaggcagcgtttccggagtttgttcctcccagtgggttcgtggtctcgctggctcaggagtgaagctgcagaccttcgcggtgagtgttacagctcataaaggcagcgtggacccaaagagtgagcagtagcaagatttattgcaaagagcaaaagaacaaagcttccatagtgtggaaggggacccaagcgggttgccactgctggctcaggcagcctgcttttagtctcttgtctggccccacccacatcctgctgattggtagagccgagtggtctgttttgacagggcactgattggtgtatttataatccctgagagctagacacaaaggttctccacgtccccaccagagtagctagatacggagtgtagaatggtgcattcacaaaccctgagctagacacagggtgctgattggtgtgtttacaaaccttgagctagatacagagtgcagattggtgtatttacaatcccttagctagacataaaggttctccaagtccccaccagactcaggagcccagctggcttcacccagtggatcccacactggggctgcaggtggagctgcctgccagtcctgtgctgtgcgcccgcactcctcagcccttgggtggtcgatgggactgggcactgtggagcagggggcggcgctcatgggggaggctcctgctgcacaggaaccctctgaggggggaggctcaggcatgtcgggctgcaggtcccaagccctgccccacagggaggcagctaaggcccagcgagaaatcgagcagtgccggtgggctggcactgctgggggacccagtacaccctccacagccgctggcttgggtgctaagcccctcattgcccagggctggcagggccagccagctgctccaagtgtggggcctgctaaacccacgcccacctggaactacagctgacctgcaagcaccgggcgcagccccggttcccgctcgcgcctctccctccacacctccctgcaagctgagggagccagctccagccttggccagcccagaaaggggctcccacagtgcagcagtgggctgaagggctcctcaagtgccgccaaagtgggagcccaggcagaggaggcgccaggagtgagcaagggctgcaagggctgccagcacactgtcacctgtcagtagcagtcctattttttcatcagattttaactgaactatcttagtatttttaattatcaatttagaggagcttatcactaaatactgtggaattttaaaacgtggaaatttttctgacctgtgtatggcaagaaaacacaattatcattagagttaatatatactggggacttcctacactccagacactgttctaagcactttatagttatatcccttaatcctcacaatgacttagagtatgacctaaattattctgtttttataaatgtgataaaaagacataatgctatttctaactgaaccttagacaagttgcttaaagttgagatgctaactttgtcattctgacagtagcacatgattcttgatcactatgttgtatggcatcctgtggaagataataggagataaccttatctatcatggttaacttccagcttttaatgaatggatatccaaacaactaagtcaaagcaaccttgaggagcttattagataattataaaaactaacacatatgggaccgtatctcttagacattttgaagtagtttgtagatgtggtgcatagattttagttgcaatttattaagtacaaggtggtagtagtttctgaaggaatatattcccaaaatttataataattcaaaggtaacaattcattcccatttttccataggattgagaataaagttgaaggaacaatttctgagcacaaatctatatgtatttttagctaatagggcggcattttttggtggctgcctcactttattcaaactgtggtattatattttatttccatcccaaggttcctacttttttagggcatcttttcagtattggcactagcttcatcacctaaacacttagatgacgtttatttaggttattttaaaaggtttgaaagtataatcatggagaattttaacatttagtatttatgcacatcagttaagggtgttctgaagtcataaatgatagtgtgatttttatgctactggtaagcatttctggcctccagctgaaatttgacctccatgggacataagcataattacaatctataatttgcttgttagtcactcagaagaagcaccgctggcatttggggcaggagagttctccattggcataagaagatctttggactagcagcttgtaaactctatctgtattcattagttttctcctctgtgccttagaaccattgctttttctcactgcagcctagagtcattgctggtgatgatcttccaaaacctgtaatagtaacagaaattttattcatttaacattttcatcgtgctctcactcagtaatggtgctggggaaacaacaatggtgaacaccatctcggagattctgggaggatggcattagaacagctgaagcataattttttagactcccttgatcttgtcataaaaatggagccataggatttcagaatcagagttagcataagaaaatatgacaataaagaccaaaaataacattcctgatacaccgaaagcataccaaaaagacacgtgcctagaacagataaacattaacctaatttatcaagtgaactgaaataaattcagaaaaaatgatagaaagtataggggaaaaattataaatcagaattagaaatactgataaatgtaagtagagaattcaagaatgaatgagacataaaagagaaaaccttgcagatatgtagactaaattagaagaaacactaaagcaaataaacaacagataatgcttatggtaaatagaagataaagagaaaattttcagaatcataaaaacatttttaaaaggaattgagaaaaaaaaaacctcaaagaagataccatatgagtatggtagtaatacccaaagataaccaaagcaatggaacaaaataaattttataatgagaaattttaatccttgttatatttaacccttttgttcattcaatgctgttatacattccctttgtagtgggttgaatctaggaaaagggtcttgtccaatataattaaggatctcaagatgaagcatcctgtatcgtcacgggtacgtcctaaatccaatgacaagtgttcttataaaagacaagagaaggcacaaagacaaagaaaaagccacgtgaaacacaatagaaggcataaataaaaagccacgtgaaagcaaaggcagaaactagagcaatgcagctacaaagaatgctgacagctaccaaaagctgaaaaagacaagaaaccattctcctctcttgtcttcagagggattgtggccctgccaacaccttgattttgtacttctgtcctccagaaccatgacagaatgaatttctgttattttaagccaagtaggtggtacagcagccacgggaaactaatatatgtggtttgctttatatttatgttggacagcattctcttagatcctacaaccaattcacagaaaacacagggctgaggaaccagttaaacttcaccagggaatacagttcacaaaatttagcccatgggaaattccacagagtaaactatctaatctccacaaataaattgaaatggaagccttctatggatgaaaagagactcagacatatcaaccagtcacaaccagtttggaacctgattaaaacaaaatgtaaaaaaaaaactccaatttatgagaaaattgaaaatgtgaacactaaccatatgtttgatattaaggaatttattgagatttttttaaagtgtagtaatgatattgtactcttatgtatctttaaatcctttagagctgtatactgaaatatttatagataaaatgataggatatctaggatttgaaatagcacaggggaagcaggagaagcagatggagttaaaggtgtgacaggatggccatgggccaggcgtggtggctcacgcctgtaatcccagcacttttggaggctgaggctggtggataaccagaggtcaggagttcaagaccagcctggccaacatggtgaaaccctgtctctacttacaatacagaaaaaaaaattatctgggcatagtggcaggtgcctgtagtcccagctacttgggaggctgaggcatgagaatcacttgaacctgggaggcagaggttgcagtgagccaaaatagtgccattgcactctagcctgggcaacaagagcaaaactccatctcaaaaaaaaaaaaaaaataaaaaaaataaaaacagagtctgttcctccatggagtttagattcaagtgaatagagctcacagtcccaaaatcttaggcattcagagaacagcacattcccagtaaggggccagacaacattttagcctttatggaccacatgtggttgactgttttgttgcatatccttttgttttgttgaggttttgaccaatcttttaaaatgtacaaacaattcacagttcttgaactgtacaaaaacatcccatgggcaattgctgacccctgcagctaccctttcttaaaaaaaaaaaaaagtcatttagaagccaaaatatatttcttgaggaagactactctcccagcaatagttctgcatccagtatttggaaaagacatagatatagcatcaactttattgctgaacaagatttaagagttattacttatgtatattttctgtgtggcttatttacttgttccccaaagcatacaggcaatgttatcattgactgttgctaggaccatatttgaaagcagtgccatgtttaataccctttagaaacctggaggcttgctaattttaattttatacttggcctgcacacaacacatccttgatgtgttgtccccatacttgttttattcatttcttattttcttttcatcttcctctctaaattatgtattcctttaatgtgggaaactgttactctttttttttattctccctgctctaatgcccaacattacttccttttgacaaattaaaatagcaggctcttaaatgttcctaaataaatgaaaacaattcagaatttctccactacatgaagttttatgctgcttaaggaaggttgctgtatttgttgtcatcagttctgggctctgctagatttacacttggatcttccaggatctctgaccctaccagcattggtacgttttgaggaagtgttcatgtacatctccttattccagggaaattagatatccttataacacattaataccttgacataccagctttccaagaagtctcttttttgaaagaaacaaaagtaaattcaccagttgcttctaaaaatgttttaaatatatatggtgtttttttaaaatgtgtatgtataacaatatctattaggatttaatataataatgtgtttaagttaaaatgttttttttctctttctgactcaggaagaaatagataaaatggtagagaccacagagttaatgactgggaatattcagagcctaaagaacaaaattcagattctggcaagtgaggtggaagaagaagaggagagagtaaaacaggtaattattttaaactgtattattggaatttggatataatttttaatggttaaattatgcaaagataactttcgagtataatatgatgagagaaatcagctttttgaaataatctgtagctttcttctactttagatgcatcaaataaatagtagtggagtactctctcttccggaactttctcagaaaactctcaaagcacccacacttcaggtaagtgcctatttaccatattgattacaggcatactttagagatgttgcaaatttggattcagaccacagcaaaaaagcaaatactgcaataacgcaagtcacacaaatgttttggtttcccacggcatatggaagttatgtttacgctatactgtagtctagtaagtgtgaaaaagcattatttcttttttttttttttaaagggacataccttaatttagaaaacgctttactgctaaaaaatgttaacaatcatctgcaccttcagcaggtcgtaatctttttgccagtggagggtcttgcctcaatgttgatggctgctgactgatagcgtggtgattactgaaggttgggatgcatgtggcaatttcttaaaataagaagacaatgaaatttgccacatcagttgattcttcctttcacgaaagttttccctgtagcatgtgatgctgtttcatagcattttacccacagtagaacctccttcaaaattggagtcagttctctcattccttgtcacagctttgtcagctaagtttttgtcatatactatatccttcattgatatttcaactatgttcataacatcttcatcatgaatagattccatctcaagaaaccactttctttgctcatccataagaagtaactcctcgtccatccaatttttatcatgagattgcagcaattcaggtacatcttcaggctccacttctaattctggttctcttgctgtttccaccacatcttcagtcacttcctccactaaagtcttgaacttctcaaagtcatccatgaggattcaaaattgaatccattttttctaaactcctgttattggtattttgacttcctcttgtgaatcatgaatgctcttactgacatctagaatgataaatttattttaatatgtttacaatttattttgcccagatccatcagagaaatcactacctagggcagctatagccttatgaaatgtatttcttaagtgataagacttgaaaattgaaatgactctttgattcagaggctgcagaacagatgtgttagcagatgtgaaaacaacattaatctccttgtatatcttcatcagagctcttgggtaactgtgaacattttcaatgagcagtaatattttcaaaggaatcttcttttctgagcagtagctcttaacagtgggcttaaaatattcagtaagccatgctctaaacagttgtactgtcatccaggctttgttgttccatttacagagcacagacaacacagatgtagttgatttagtagaattaaggaccctgggattttcagaatgatcagtgagcattggcttcaacttcatgtcaccagctgcattagcccctaacaagagcctaacaaaagcatctcctttaaagctttgaagccaggcattgccttctcttttccaactatcaaagtcctagagatagcatcttcttccaatagaatgctgttttatttacattgaaaatatgttgtttactatagccaccttcaccagtgatcttagctagctaggtcttctgggtaactagctgtaatttttctatcagcacttgctgcttcaccttgcactttttatgttataaacacagcttctttccttaaaccttatgaactaacttctgctagcttcaaacttttcttctgcaacttcctcacctctgtcagccttcatagacttgaaaacagttagggccttgctgtggattaggatttggtttaagggaatgtcgtggctggtttgatcttccatccagaccactcagacttcccatatcaacaataaggctgttttgctttctcattattcatgtattcactgaagtagcactttaaattttcttcaagaacttttcctttgcattcacaacttgggcgtttggcacaagaggcctagcttttggtttgcgtggcttttgataggccttcctcactaaacttagtaatctctagtttttgatttaaagtaagagacatgattcttcttttcacctgaacacttagaggccattgtagcattattaactggcctaatttcaatatcgttgtgtcacagggaatagggaggcccaaggagagggagagaaactgggaaataaatggccggttggtggagccgtcagaacacataacaattaccaattcagttcactgtttgatatggttgcagttatggcacccagaacaattacagcagttccatcaaagaacactgggcatagatcaccataacagataccgtaataatttttaaagtttgaactattacaagaattaccaaaatgtgatgtagagatacaaagtgagcatgtgcttttggaaaaatggtgctgatagacctcctttgcacagagttgccacaaaccttcagtttgtaaaaaatgcagtgtctgggaacacggtaaaatgaggcatcctggtatatcatagaccaattatacattacatatatgaaaacattatgtcctatttcgttctttaaacaaatggaacctgatataaactgtttggcaaattacttttctcattcgactgtatagtttgaacatcttgtcagtcacgtagatctctcatttttgttgatagctatgtaacattctgttgtatggaggtcatataatttgtaaattactgatggaaatacataatttttttaatacaggtaagactgggtacacccttgtacatatgtctttactgatttgtatagtcataattgtaggatacatttctagaagtaaatactgacagtttggtttttttaatgcttctaacaatagcatataactccttataaaatagtactgtcttatttgtagtaaactatttcttccaagggctctagtagacattgtagtataaatgtttgtagcattggaaagtcttcatgttttctcaagaagtaatttgaaattttcctattggctgggcacagtggctcacacctgtaatcccagcactttgggaggccaaggcaggcggattgcctgaggtcaggagttcgagaacagcctgaccaacatggagaaaccccatctctactaaaaatacaaaattagccaggtgtggtggcacatgcctgtaatcccagctattcgggaggctgaggcaggagaattgcttgaacctgggagctggaggttgcagtgagccaggactgcgccattgtactccagcctgggcaagaagagcaaaactccacctcaaaaaaacaaaaacaaacaaacaaacaaatcctatcatttaccagtggtgaaaggagcaggatggggagagggagagatagatttgaaagaagaatggcgattcgttgacaattattgaagttggatgatagatacttaaggtttattttactgttctctctaacatacatttgagatttctcataataaaatgttaacaactacatttaatactatctttcccacagaaagaaattttggcgctaattccaaaccagaatgctcttctaaaggacttggatattcttcataattcatcacagatgaagagcatgtcaaccttcattgaagaagcctataagaaactggatgcatcttaaagagtgttttttttttagattgttccatattaatttaatgttcgtgaatttgtaaaactgttaacctatgattatatgtacagaggctaaggcttctgcaggatttattatctcctgatatgcactttaaaattagtctttgtagttctatcattagcatctaatgtagttctgaagactgtttttagcagttgccaaatctaggaaactaacatttatattgctgtatctataagtatttgcctaaaaccataaaataggaattgccttaaggatctagtagtttataatgcctgaatggaactcatttattggttaacagctcatatcaggagctgtgataagtaagtgtttacatacactgtctagtgcataaaaaccttagtgtttgctatcattcattctgtagccaatggcttacagtttctgtctggtcatctggaacttgaaaaatcctcaaatgccttcactcttttacctaactccctagtctttttgggaagtagttaagatatgcctgctatctttaactttggaggtagtatcaaaattttacttctttggttgtttagtgaattaatgttgaatattttctactgtcatcaaaacatattcccaaaaagtattaaaaaggaaccttagcacatttattttattaaaacaagaaaacccaaaatatataaaccttttcttattatgataataagcttatatatgtgaataagttataacctagtgtataaaaaattatttctaacaaactacagtatactgtcttgggtttttttttttttttttagtctgtaaaataaaatgactgcaattacttttt

SEQ ID NO: 105 - DNA, 30368 bp, Homo sapiens
attatttgaagacgctcacggagcggctggctaggctgaggagagctcgccgggctctgaggcgcaggtaacctctggagtaggccgaggcggggggctgtggaaggctgaggcgagcgggagaccctgtggaacgtgggggcgaatgtcacggggaaagagcttttgctcggcgctcggcaggtccgcaggcccgagaccgaagaagccactgactcgttctccgcgctcacaggcgccgggtttccctcttcccgacgccggcgtttccttgttttgggtttagggtttgtttgtttgtttgtttccctgaccgggttcagggtcgggacgctttcctctcctacctttcctcgcttagccccagaggggtccccccttaagccgcagctcgacctgaattcccagagaccctggcctttcagtttgttcattcattaatagctttgaaataacgcttgtgtgctgctttggggggaatttccctgatcccagggaaggggaaggaaatgaattctgacgagccacgtagccgcctgctcgtgcattctagcatttgttttcagcagccttacgacttcaagagatttttataaaaagggaagcaaacggcttgctccgggctcatcagctaggaaaatggcagaggactgtgcttcacccgttttcttgctgggctctgatgaaaagttacagacggtctctgccttcattgaaggctgttgagatggggaaacaagaaaatgtcttaaatggactattagggaaatacagggtgccatggaagcagaacaagcgcgtgtaacccttggaggggtggaaggagagcaatgtcgaggaagacctcccagaaaatagggttttaacttggtgtgaaatagactaattaaagggggtataattttgataaagcgatttttaatattttgatgaatgtggttattgtcatttcttttaggaattcaataaagaaaatggcagctcttactccaaggaagaggaagcaggattctttgaagtgtgacaggtgaatctcagcctgtgaatagaaactcttagaaaaatccaccttcttgtctctcttgttctctcctattttctaaaattttcgttcttccactagcctactccttgtggctacagtgataacctgataacctatattctaattctagcttggaaatacattaagttttcataatgaattatttagtccttttcaagggaatcaaagctgttttttagtttttgtttttttcttttgacatagaagcagcacattgaagaaagctgttttctatagctaggaaatataccaaatcagctattacctttttcctttctgttcccctataatattttacagtgttttgcatacagtagatgcttgtctggaaacaattctagaaagactgtgtactcagatattaattactctacccaggaaaagccccagggggtcagttcattacagacagttattatagggggcttgtaaacaatagagcaaaatatatgagctataatttatatatggccaacacatagaaatcgattttaaaacatacatgcatatatgtctatcatagcttctttgtatatagtatttgttttcatgaactctttgggaagatatttgaatgttttatttgataaagacagaatttgagaatcctactgttaaactaatagaaaattgtgtgtatggggggtacatgtattgtttttaatatgacctacaagtagagcttacttagcagtagatttatgtaaattttgacgcaaaataatcttatcaatggactttgtttctttttatagccttttacacttcactgaaaatctgtttccatcacctaataaaaagcactgtttttatcaaaacagtgataaaaatgaagaaaacctgcattgctctcaacaagagcattttgttttaagtgcgctcaaaacaactgaaataaatagactgccatcagcaaatcaaggctcaccatttaaatctgcgctctccactgtatctttttacaaccaaaataagtggtacctcaatccactggagagaaagctgataaaagagagtagatctacttgtctaaaaactaatgatgaagataaatcttttcccattgtgacagaaaaaatgcaaggaaaaccagtctgctccaagaagaacaacaaaaaaccacagaagagtttaactgctaagtatcaaccaaagtatagacacatcaagcctgtatcaaggaattctagaaattccaagcaaaatcgagtgatctataagccaattgtggagaaggaaaataattgtcattcagctgaaaataattccaatgctcctcgggttctgagccaaaaaataaaaccacaagttacactccagggtggagcagcattttttgttagaaaaaaatcttctcttagaaaatcgtccctggaaaatgagccgtcactgggacgcacccaaaagagtaaatcagaagtcattgaagattctgatgtagagactgtcagtgaaaaaaaaacttttgcgacaaggcaagtgccaaagtgcttggtcctagaagagaaattgaaaattggactactgagtgcaagcagtaaaaataaagagaaattaataaaggtaaagctaaatatatcactttaaaaatggctgtataacaaaacttcagtataaatgacatagttgaataaaattttattttctggactgcttttataaagccagatagcatagtgtttagttactgtaaggagtttatttatttatttattttaagacagggtctttctttatgacccaggctgtagtgcagtggcacactgctcactacagcctcaacctcctaggctcaagcaatcccacctcagcctcccaagtagctggtactatagatgcacaccacctcacccggctaattcttgcattttttgtagaggctggggtttcaccatgttgcccaggctggtctcgcactgctgggctatagtgatccacctgcctcaccctcccaaattgctgggattatgggtgtgaaccactgcacctggcccagccacattttaagttctcaatagttacatgtagctggtggctaccatattagaccatgctggtctagaacttctgttgctgacctcctgtttatatccttcatcagaaaaaaagttgagttttgtggggcagctaggggcagaaagccattgaagcaaccttaagagaggttgtctccagatcagggcttccatgtatggtggcttgtttatattcatcacaacccttgtagctggagaaatgataggcttatatgatacccagtacactcaggcttatagtcatgtctttcctaacccacctctcatcattgccttcctcactagtttctctcaaattcaaccccagtccatatctctcgtaatcacctaaatttcaaacctcagtggcaaagataataaattggtggccagtaaaccaaatctcacccataaatgttttgcttggcctacataatttaaaagttggagccaaaattatttttaaatacaagaaaaacatttctggtgtctcatgaaatattgaaagctgagccttcatttctacatggcaataatcagagctgaatatcaggctgagtatcataccatttgacaaatatgggttcttcatttctctaagtcagtgtatatctatctatttagatcagtttagttttgatcattttacttactgctgcccttgtaaggcatttaagtttttagtcctcactgtaaatgtttgttttttttcctgtttatcgagtatggccaagtagattgttaaatgagatacgttcttgctagctaagccatgacagtctaattttactaattcattttctgtttatatcaacaaaacacttctgtgtcttgatagggattttgattacaagagtaagctttatcaaaatgtattaaactgtgctttatacttatacatttgtatgaaaattaagttttttgaaagtttggggcgtaactcaagctaaaattgtctcaatccagtaaaacaaaggaagagtctgcagtttccccatgcatctcctgatgattattcttatctgtttggtacagcctggtggtgtaccaaatgaatggtgacctgatgaattctctgtaaccagtgtaacagagaattctgtaattctcttttctgtcttattttctttttcttagcttcactttacgggtttggtattgagttagttttcagtagtttgggaagctgggcttttgtgcattttaaatttgtggaacggggctatgctctttcaagattttgctaaatacccatgtctgggattcgtctctgctagctaagggcgaatctgattttctgtttttttattttgagatggagtctcactccgttgcccaggctggagtgcagtggcatgatctcaactcactgcaacctccgcctcccaggttcaagcaattctctgcctcagcctcccaagtagctggtattgtaggcaccggccaccacacctggctaatttttgtatttttagtaggaacggggtttcaccctctcagccaggctggtcttgaactcctgactttgtgatccacctgccttggccacccaaagtgctggtattacaagtgtgagccaccgcgcctggccggtgaatctgatttttgtgaggataccctttccccaactcatggagccctgaaaagtgttaaactgatgggttatcccacctctgctgggatattatggttttgagtagaagttctactttaaccaagagtttttttcctttttccccaagctatatattccctagtaattcccaaattagtatgagggaaatctgtcaggatttttttctactttgcttttcccacattcctgctactctccagtgactctagaatgttctttccttagctgctgatttttaaagtttatggcaaaaagttgtccctttccagtttggtggctgctggggaaacttttgccatttttactggcttttttgttcatttcattatggaagtgatggtctgtaatcattctgccatctctgtcaggaagtataacacatttttgagaggatgacagattacaacacgtgtactctggcttttttttcttttgagacagtcttgctctgttgccaggctggagtgcagtggcacgatcttggctcactgcaacctccgcctcctgggttcaagcaattctcctgcctcagcctcccgagtagctgggactgcaggtgccaccacgcccagctaatttttgtatttttagtagagatagggtttcaccatgttagccaggatggtctcaatcccttgacctcgcaatctacccacctcggcctcccaaagtgctggcattacaggcatgagccaccgggccctgctgtactctggctttaaaggtaatgtacgcttagtgaatacaggggaagttttcctaaaaatagtttgaaaattgattgaaaatcacattatgaaatgtaattcataataaaccaaatcttttgttttagaaatagatctgctgggattcattcactagaaaatagttaaaaattacagatgtttggttttttttttaaacctattttcaggattcatcagatgacagagtttcttcaaaggaacataaagttgataaaaatgaggctttttcttcagaggattctcttggtgagaataagacaagtaagagaaaactcgcatgaatttagctgcttaaaataatgctttattacatacattatacaataataattcttgtaatttctgggtctttcttttttcagtagcgtgcctgtggttagtatctttgtttatctctgtgacactgttttctgtagtaaagcagtgcattgcgttttgaaaaacaagaaacaaggagatcctaggttaaaattttagacaaaatattaggcttaattggtctatggctgtggccaagttacttaagctctctagagttgagtgttctcattataaaatcatacctactctatctttcacccaaaataatagaagttaaaactattatgtatatttgtgatcaaagcccaattgtgagcagaacttactaagttttataagtgacactgaaattaagcatcaagaaccatggatttttgtctaggtttactaataattagctgtatgatctaggaagatatctctaaagagttaaagttaatttttaaattcctgtcaattctgaaatcctattcctaatttatgctgtcagtgttcaattaaatagcttactaaactatgaatacataaagcttttttttatgattctgagatatgatgttaataactagtatttactgagtgctgaatataaggcagtgctaaatatttagtatacgttatgtttttcatagattgtgctcaaagcactgatacaatagaaaatataacaaaaaggcatctacttaaaatagttataaatttttcttttaaaatatattttagtacattgtctaagtcaatttaaagaaaaatagtgaataaaaataatacaaatggtataaggatatgggagaaatcataaaagtaatataaaaagaccaaaactttattacttaataactacagtttatcatttaattctccctactactctaggtcctgatatgcccatttatagatgaggaaatggacttgggttaagtaacttaccaatagcagctcagactttcacctgccttggccttgtttctagaggatgagctctaattatttttcaatgcaaagttaaagtttgtttttttagcccactctcagcttactattttcctcaaatcaattgctgttttaactttgctcttttcttttaatagactttattttgccataattttagatttacagaaaagttaaagtacagagagtagcagtgtatctcttaccctgtttcctccattcttaacatcttatgttataatacttttgtcaaaactaagaaacttgtattggtatagactttttttttttttttttgagatggagtttcactgtgttgctcaggctggagtgcagtggcaccatcttggctcactgcagcctccacctccagggttcaagcatttctcccgcctcagcctcccaagtagctgggattacaggcatccaccaccatgcccggctaatttttgttaagatggggtttcaccatgttggccatgctggtctcaaactcctgacctcaagtgatccccccacttcagcctcccagagtgctgggattacaggcataagcccttgtgcctggccctaagcactagactttatttggagttcaccaaatattggtagtggtatattactgttaactaaactctaaactttatttggaatcttctattaatgttttctttctgtcccagtatccattccaaggtactatattacgtttaattgtcatgtgtctttagtcttatctgtgacattttctgtcttatttctttgtttgcatattgccagctggacgttgatatttccaactctaatccagtactccaggatttattctatccttttttcatctgtaacttccttctcggacagtgagacacttagttcctactattcactatccatctacttatttgttctgtcccagtaaacatgtaaaacagtttcataattgttaattcatacccctgtgagaaataaccaattagagtgcaatttttttctctttgagacagaggctcactctcacccaggctggagtgcaatggcgtaatctcagctcactgcaacctctgcccccagggttctagcgattctcttacctcagcctcccaagtagctggcattacaggtgtctgccaccatgcccggctaatttttttgtatttttagtagagacggggtttcgccacgttgggcagggtggtctcaaactcctgacctcagatgatccacccgccttggcctcccttacctttcatctcatagttcatgttgaggttgagatgaatcttatctaattcagtctctttttctatatgtaattattgctgaagtaagcttttgtggaatcctatatcagctcatgccattcttctctaaatgtgatatattttcaattttttccctttgtagaattccatatatagttaaataatatatatatattaaataatatattttttaggatgacaggcgtgagccactgcactcggcctagagtgcaattttaagtgcaatctttttgtctttatccttataacttctagtcaaaacaccatttgctaaagttacttaggacagcttctctttttccccctacctccttcagtgtcgttatgctatacagttctaatatagttagattcatttctcacagtctgcattccatcttaggctacctcagtagcctggttgatatttatatgtatttttttttctcatttgatgtacattggagttcattctttgtgatttttacagttctgtgggttttatcaaatgtatagaattacgtattagccattacagtaccatacagaacagttccttcaccctaaaatttccctatgcctacattttattgttactctccttcccctcagccccctggcaacaattaatctgctttttatttctatagttttaccttttccaggaaaaacattacacatatatatcctttggggtctggcttatttcacttagtaatacatttaaggttcatccatgttgttgggtgtatcagtagtaattctcatttattgctgaactattgacataccataagcattctttatatattctggatacaagtttttgatcagatatatgattgcaaatattttctcccctcaatctgtggcttaccttttcattctctttattttttgtagagcaaaattttttaatttgataaagtccaaattaattttttataaatatattatgctttcgctgttgtatgtaaaaacttattaccaaatccaagttcatgaagatttttccctaatattttttctagacattttatagttttatgtttttcctttattattaatttttttacagagacacagtctcactaagttgcccagactggtcttgaactcctggccttaggcgatcctcccacttttggtctcctaaagtgttgggattacaagcatgagccaccacgcctggtcatagttttacatttagatctgtgatccatttgagttaattttacataaggtttgaataggtgtaatttttttgcatgtggacatttaattggtccagcaccatctgttgaggactgtttttcctccatggaattacctttgcctctttgttaaatcttgatcttgagtattattttgtcttattaacctttgaaatcttatgaattaaagctttgattttatttggtaatacacattatcatgatttttcccctaccagtttctcctaagtccactgtctatccaatcttcagtgcatcttcagtcaattcaaaaaggtgagaattgttattgttttaaagtccaagccttgtaaattatacagttcctctgggtctctttttcagtctcatgctacttaatttggggagtttttttttcttcctcactaaggggaataggagaataatattgagaatagggtgatgaaatcagtccctcatagaaacatcataagaacttaagagttgagagatggaaaagatctttatatacttgagtaataataattgctaacattattatataataccttacccataataagtagttttatatctattatcttaattttcacaacaacttagaagttagatactattattctgttttcagcctaagaaactgttagtaatttagccacagttgccacagctattaggtgctaggaccaggactagaatccatatctgaaccaaatgcccattaggttatattgccttccctgggtgatagtatagtagctacaatttaataagcatttacaacttcatgatgtaggtaccattattaccccatgttgtagatgagaaagctggctggaggagtaagtaacttgcagcagcttaatgttatcataaagtatagctgaagctaccagtacccaagctaaagactgcaatggaggaggcatggatgggtagagagcatgataggcggcagagctctgaaaaagtagtttcttatggtctaaacatcctcttcctaagcagctttgattcttctctccccatttgattataaataactccagatattaagcaaggaacttcccggctacattttccttactctcagagcacctcaccttaaattgcctcagtgattaggatgggtgcacagctttccctcttcaaaggtttgtttctagtttttctcacctttcccatttttcacctgtgttgtcatctttcatgaccttttattgaagatgggagctgtcttagttcattttgtgttgctatcacaaaataccatggactaggtaatttataatggacagaaatttatttggctcacagttatagaggctgagaagttcgagatcaagcagccacatctggtgggtgccttcttgctgcatgatcccatggcggaaggcagaacaagagagtgtgcatgagagaacaagagagcttggcttgcagcctcacatccttcaataatcaacattaatccattcatgaaggtggagccatcatgagctaaacacctcttattaggccccacctcccaaaactgttgcactagagattaagttttcacacatgaactttgggggacgtgttcaaaccatagcagaagcctaccacaattaactgataaaagtgtatactaatttagtctagcataaagagacaggccaggcgcagtggctcatgcctgtaatcccagcactttgggaggccgaggtgggtggatcacctgaggtctggagtttgagactagcctggccaacatggggaaaccgtctttccaaaaaatacagaaattagttgggcatgatggggcatgcctgtaatcccagctactcaggaagctgagacaggagactagcttgaacccaagaggcagaggttgcagtgagccaagatggtgccactgcactccagcctgggcaacagagcaagattccatctcaaaaaaaaaaaaaaagacagtgggatactatttgttaaataatatgatattgctctttttgtagactccaaaacgtcagttatcagcaatttgagatttaatctattacttcagatgattacagattctcaaagtgcttagtcgcacatttgttttttggtttttaaaattcaatgaacatttagagagtatcacatgctattgaactatactgagttctagagatgtgaagataattaatgtggtcttgctatcaaggaggttatggttagaggagggtagacatttaaacaaatatagtgttagagttgctaaaatggaagcaaagagatggctgtcacgcatgcagagtcagggagagcctagcaaaggctgcataaggtgaaaagggtcagtgacttgaacaagtgttttttcatactgtaggaagtagcccattagtagttcatcagaccagtttagggtgtcatatcttgtgacagttactatgggactgaacgaaggtggacgaacgcagaaatgaagacaaagacaaaaggatctttttaaagaaggggtcgggagctcctgctagtgagcaagggccctgagcttttacagccttttatatttattgggtagaaagagcagggaggaggaggtaaaggtcagctgcttgatttatcacaggttcacgtgattgctaacaggcttcaaatgtgcctatagataatcgcaagaaacactgtgcctgggcatgactgccctcagcattccttctgggtggcagatgcagtttgtcagtttgccaacaacctgcattcatgataacagtttgctgtttgctcatatagcctccagtggtatactgagttagtcacaaccctcattcttttggcctccaacaatagcatttatttttagtggaatagtgtatctctcacacagcaagtatatttagtgaaactttggttttatgtctgtactagtcatgtgaaatgtatttcttagcatagatttgtcaagtcagtttgaaaactacttttcagacaaatggtaagaagatagcttgacttagcttaatgcagtggagctaatgctccacctttttttttttttttttctactttgtcaggtttttttttttcctgttgtttgaacttcttacttttggtactagggttttttttttttttctttcttatttacttctactctttagggatttctactcctttggtccctggaaaaccaaggtcctttcattacaaggcaagggttacaaactcagtacctacagaaccagcaggctgggtggagactagggccagctgaagaattgcccacttaaaagggcatgtgctattccaagttcgaactcatagattctttgatggagtagaggtttagtgatcttacaatgtctcttaatattggaaatacacatttttaagtgaaatctctagattttaaaatattggtagctaatccaaagtttttaaataccatatgggccaaccaaaacatatctgctagctagatttggcctgaggggctccagtttgcaacctctataagtgaatctcaacattctttcataataggtaaaggttgtctcaactacagctatccagcctaaatatgtttttgttttttttttttccttaagaatttcacagtagtgagatgctgcttttggtatgaggaaaagcaaatttagaagcttcattgcccaggtgctgggtcataatatgatggtgactctgatttcctgtggatctgtgaagttcagtattatacttattttctccagtaccccaggaatttcttcatagctgtatggggtaaatattgtcctaagatttgataaagcaaaaaaatctttttttaaagggcaaagtcaatttccaaagtgtgcatctatgtgcatctgatattgtggaagaaagtccctaggacttggagtcagaggaccaggatttgagtgttaacactgccatttactagttactttaccttgagtaaattactgaccctctctgagtaggcctcaggtttctctttgttcctgtccttattacttcatcaagttaatgtcagatagaaagcactaaaaattgcaaggtactctgataaatggctgctttctttcccttgtaattcctccaaaattgtaaatttatatatatcaactttctgtgtcaagatctttaggtgaagaacagttttctgtgggatctgtcaacttcatgaaacagaccaatatccagaaaaatactaataccagagatacaagtaaaaaaacaaaagaccagctcatcatcgtgagtaaattccaaacaaagcttctcctatctagccctttgcagaaaagcttgccaacccctgtattagacagttcagaacttggtattttcaatgtcattaagcaatgttttatgtgacagaatgggagttgtaggtggtgacattgaatattcttgaatttatctgtgcttttcctgcactctattttttgtcaactcttgggtcaaataattttaatattgtttaaaataatttaatattcttagctgcttaaggaaaaatattgtataattaatatagaagtcctaaaatttttgccctccctgtttgaaataaggctttttcaggtctttaagggtttcattaaaaagttccgttgttcattttagctgtaatttccacaatttaatcttattctttcttagaaccatgagtctagtaaataatcttgtaaaaataaaaaaatctttggtttttacactgtccattcaaataattccctttcatcaatttattgcatttttaggtctcttgtctcttttttttccccccccaaagagatggagtctcaccatgtcgcccagactggtctctaactccttggctcaagtgatccacccacctcagcctcccaaagtgccgagattacaggcgtgagccactgtgcctggcctgatctcatttcattttgtcttgggggagggaaggaggatatggtaaccagattttcatttagtttttcacttgtgtcagcaggaaaaaaaaaattaggtgaaatttgaatgaatggttataggaacttaatttagagctatttgtgctatatttaaatgggtttctttttttaccccccaattataggacgctggtcagaaacattttggggctactgtgtgcaagtcttgtggtatgatatatactgcttccaaccctgaagatgaaatgcagcatgtacagcatcaccacaggtttctggaaggaatcaaatatgtggtgagccaaaacatagtctttcagtttgttctagaagtaaaactaaaagagacatttcttttccaccacctctaccacccagccggaaaagttaacttttaatgatgatgtttcaagcttactatctcaatttaagataaatattttgtaaacactgcattctgagcagagctgaacagtccagatatacaaaattcagagactgcagagatactctcttcccactatagtgttgtctttataggtagccttaggaaaaaaatagccttcccatgacttctccaggttttttctgagaggagaggtcccacccatttattaaacacctttcaagtccaaacacatcctatcattggccctatctttatgattgtacctgctactcagatacattcctttttccctatttttattgccacggttaatgccttcacaatatttttagcctgtttattgaaatggcttgctttctgggttcccatagtgctaccagaaataacgttttaaaacataagtctaggccgggtgcagtgactcactcctgtaatcccagcattttgggaggccgaggtgggtggatcacctgaggtcaggagtttgagaccagcctgcccaacatggcgaaaacctgtctctactaaaaatacaaaaaattagccaggcgtggtggcgggtgcctgtaatcccagctactcgggaggctgaggcaggagaatcgcctgaacccaggaggtggaggttgcagtgagccaagattgtgccactgcactctagcctgggtgacaagagcaaaactccatctcaaaaaaaaaaaaaaaaagccatagatgaaacataagtctagtatgattctacatacttctggaaagaaaaagttcccaccagaagtttggtgctctttaatctggcctcaacctttcctatatatgtgcatataaaatacatacaaaagagaaagtgtgtatgtgtgtagtttaaattcttgccctctctgatctgatctctacatcagccagaaagttctttctaaaacataggttctgacattgtctgcttcaaatttgacagctttctgttgcactaggaataaaacccagactccttaccttggctgacagatctcttcatatttggcccctgcccaccttgtcacatgacacattccctctccagctctaagctcctgccgctggaataagccacattctctgatgaagccagactataccatacgggatttctttctttaatttgtggaaacatactgggcatgttatcctttatatattttgaatatcattcctgggttacaaatacattctccctgtccctttttttaaggtttgaatttatatttttgatatagtaatactttcacatgattcaaatttcacagaatgcaaaagtatatccagtgaaaagtgtttctccataccccttccagaaacctcgttcccctatctataggcatccagcattaacagattcatctatatatctttcagagatattttctgcatatacaagcaaataccattacttggatttttttaacctttttgtggtgtatattgctacaaagaaaacatttttatttagctagtttgtgacctttggtttcttaagtcaggaacatcatctcagtcccaaaattagtaagtttttcctatatttaaaaaaatttatagctataaattttatatttagacatttaatccactggaattttttcaagacatagtgttagagatggatccttatatttttcctaaaggactgcaaagtgtgccaacattactgtttgactagtttatcttccacactgattagcaatgccacgtttaatgcataccaaattcccacatataaatgggtttgttattggacacttctgcaccatccatttgttcctgtgctagtgccatacttttataaatgtagcttcatactgtatagttaggtaagttccctttcatccttctctgtaaaaaatgtcttgactttttctgcacatttactctttcaattaaaaagcctatcacattccccccaaatgaaaaacctattcgaatttttattcaaactagtcaaactaatgccattttctctagagaaaaaaaatcttagtataacttaggaacttagtatagcacatactattatataaacttagtatatactgtagtataaacctagtgtatacttagaaacttagtatacctctgattgattcatatctttgatgtctttcaggaacattttatagttttgtcatggatcttattaaatttatttctaatatttcaacctcattttttccaatcagtcagttataccagatttttttgccattctctgcacctttgcttattcagttagttgccttagcctgaaggcaagttaaccaccttccccattatgctcactgacatcttaccaaggtttttaaacccttttcagtaccataatatttcagtatcattcaaagactagggccacatgccaaagcactatgctgggggttgagattaaaatagttgtaagactgcacccatctgtggtcttgtcaagcataagggacaaacgtataaggacttttacttagccttttcttggaatttggcttattcttctacccctcccctacctgcccactggtcttgaactcctgacctcaagtgatccacccacccgggcctcccaaagtgctaggattacaggtgtgagccaccgcacctttacctctttaccttgttttatagtcatatacatgtcttcagataggatatcagcttgttgaggccagatacctgttttaggcatcttttatttctcttcccacattacttttagttggatttcatcttcttctttttatatctattattgtttagccttttgtcttctccacatcaaattatttaatgttggttttttttcctcttcacaaattaaactgtgacccttttgttttcctttggcagggttggaagaaagaacgtgtagtagcagagttttgggatgggaaaatcgtgttggttctgccacatgatccaagctttgctatcaaaaaggtatggaacattatctttttatctcttgcctttccccacccccaagaaatcaacctatgttgaagtgcaaactgcctttgctgacagataattcacttgggtacctgcttaatgattactttcatagcaatttatacaaaactaagaattgtaggacaaaggagtaaagaaggcagataaggctccacagcttatcttttatattcatctttcccttgtgaaagataaactaagctttcaatgttgagaaattaatggcccccagggtctatttcttatattggtgttgcttgtgtttctgaggttgaatgtttagccaccgtgaataatgaataaagctaaaacaaatctgttttaatgcttcctattccttatccctcccaggtgtctcaatttctgctgaaagtgatctttaaaataggttcttaaaaccttgtttccacagtagcagctacatgcatcaatagtgaaataattttggaggtgtataaatttaagaaatagaaattaaagaggctaaagtaacagtaatcatacattctgtgtatataaatatgtatagtttctattgtactttttaaaacattcacctgtcttggtttttaaaatcattaggtagaagatgtccaagaacttgttgataatgaattgggcttccagcaagttgttcctaaatgtccaaacaaaataaaaacttttctttttatatctgatgaaaagagagtagttgggtgtttaattgcagaacccatcaaacaggtatggtatatttgttttaaattattggcataatttgcaggcaaaataaagaaaagttgggagaagtctcagcatttaagattgctaccattaatgacactcttcctactgaaatatccttgacctagtggataattgaagttatttatttccattaatatttggaattttgctttgtataaacaggataggtaagccagtcttttatgttcatgtagtcattaacacagctggattataaagtctagtgattttaagtaaacaaatctataaactgaaatttttaaacatgtggcttagtgaaggttaatatttttggcaaaatagtcattacttatcccttaattagaatctaatttaggtactaattagcaatgttctagaagacatgtagtttctccttgtgttattagaagttggagagaaaagcagcttttttgtatttttgccagtataagtgatcagtttggccttttccttccccctcagctttattaaggtataactgacaaaaattgcaaatatttacagtgtacatgtgatattttgatataggtatacattgtaaaatgactaaatcaagctaatatagctatacctcacatacttaccaacttattgtgatgagaacattaaatctactctccttgcaattttctttttctttgtttttttttttttttttctttttttgagaccaagtctcactcttttgcccaggctggagtgcagtggcacgatctcgcctcaccacaacctccacctcctgggttcaggcaattctcctgcctcagcctcccaagtagctgggactacagccgcgtgccaccatgcctggctaatttttgtatttttagtagagacggggtttcactatgttgtccaggctgatcttgaactcctgacctcctgatccacctgcctcagcctcccaaattgctgggattacaggcatgagccaccgcacccggcctttagcaattttcaagtatacattagctgcagtcatgccatacaatagatctgcagaacttactcatgcgaacttaaactttgtaccctttaccaacgtttccccatttctcccatctctcactcccccagcctctggcaaccaccattctactctgcttctatgaagtcaacttctttagattcagtatgtaagtgagatgttgcactatttttcttttttgcttgactgatttcacttagcatgatgtcctccaggttcattcatgttgttgcaaatgtcaggatttcctttttaaaggctgaatagtattccacctgtatatgtaccacattttctttattcattcatccattgatggacacttaacgttgattacatatcttggctatgaataatgctgccatgaacatgagagtacagatttctcttcaacatactgatttcagttcctttggatatacactcagaagtgggattgctgcatatggtagttgcatttttatagtaatcattctaacaggcgtgaggtgatcttgttttaatttgcatttccttgatgaattagtaatgttgaatgagcattttttcatatgtctgttcctgatttgtatgtcttcttttgaaaaatatctattctggttctttgcccattttttaatcagagtatttgttttcttggtattgggttatttatatattttggatattatcccctattgtatacacaaattttttttccaatcagtaggttggttagtttgtgtttatccactctgtactatgcagaaacttttcagtttgatgttacatttatttcttcttttattgcccacatttttggggtcatagccaaaaaattattgcccagaccgatgtcaagcttttttctcatttttttccttatagttttacagtttcaggtccctcattttaagtctttcatccattttgagttgatttttgtatgtggtttgagataagtctccaatgttattcttctgtttgtggatattcatttttcccgacaccatttattgaagagactgtgtccttgccccattgtttgttcttggcatgtttgtcagacaccagttgactctaaatgcctggatttattttatctgttttgttccattggctgctgtgttttttaatgccagtaggagtgcagtgcccctcagctttactctttggtctagattgctttggccgtttggaatctcttatggttccacaagattttaggactgttttttgtatttttgtggaaatgccattagaattttgatagggattgcattgcatttgtagattgctttgggtagtatggacattttaacgatattaattctttcaagccatgaacactggatatccttccatttatgtagatattcttcatcttctttcatcagtgttttctggtcttcagtgtatggattttcacctccttggttaaatgtattcataagtggggttttttatgctattataagtggattgtcttcttgacttctttttaagatagatcatagtttgtttttcctgtatagaaacactactgacttttgtatgttgattttgtatcctgcaccttttctgcatttgtttattctaatagtttttttggtggaggctttagggttttctgtacataagttcatgtcatttgcaaacagatgatttaacttcttcctttaaatttgaatgcctttcttttttcttcctaattgctctggcgaggaattccagaactatgtagaatagaaatgatgagagttagcatccttgtcttgttcctgattaagaggaaaagatttccacttttcattgctaagtatgatgttagttgtgggcttgtgatatatggcctttagtatattgaggtacattccttctgtacctaatttgttgagagttcttatcatgaaaggatgttggatgccttttctgtattgagatgatcatatagttttgttcttcattctgttaatatggtgtaacacattgatgtgcatgtattgagccatccttgcatccagggataaagtccactggatcatggtgtactatgcttttaatgtgctagtttgcatctgtttatcagggatattggctggtaacttctcttgtagtgtccttttctggctttggtatcagattaatctggccttgcaaaatgactttggaggtattcttcagttttttggaagagtttgaggattagtattagttctttaaatatctggtagaatttagcagtgatgtcattacagatgggctttcctatgatgcaagtttttttttttttcttaaactgattgaatctcctttttattggttagtttagattttctgtttcttcatgatttggtataggtaggttgtatgcttctaggaatttatttcttataggttacctaatttgttgatatatgattattcatagtctcttacgatcctttgtacttctgtgataatcagttgtaatgtctcctctttcatttgtgattttgtttagttgagtcttcttttttcttagtctagctaaaggtttgtcaattatctttcaaaaaaccaactcttcattttgcgaatcttttctattttttgagtccctgtttaatttatctccactgatctttattttcttccttctactaactttgggctttattcttctttttctaattatttgaggtgtaacgttaggctacttgagatctttcttctttttttatgtagaactgcttttgctgcattccataggttttggtgtgttgtgtttccattttcatttgtctcaagaaatttgtcaatttcccttttaatttctttgatccattggttgttcaggagcatgtggtttaattttcacatatttgtcagttttctacttttcctcccgtcattgatctctaattttatactgctatgaatgttctgtgtgcacttgaaaagagtgtgcattcattccgctgctattggatggaatactatatgtgtttctgttaggtccattaggtctgaagtgtaagttcagtgtttactggctgaactcagtggctcacacctgtaatcccaacactttgggaggctgaggcaggaggatagcttgaggctaagagttcaagaacagcctgggcaacatagtgagaccctgtctttacaaaaattagccaggcatggtagtgcatgcctatagtcacaggtacctaggaggctgaggcaggaagattacttgagcccaggagttcgaagctgcagtgtgctatgatcgcaccagtgcactccgctcagggcaatagtgagaccctatctcttaagaaagaaaaaaaaagttcatttccttattgattttctgtctggacgatgtatccattgttgaaagtaggatcttgaagtcccctacaattttgtattcctatctatttctcctttcagaatcctaaatatttatatatttaggtgctccaatgttagatgcatatgtatttacaactgttttatcttaatgaattgacccttttattatataattaccttctttgtctcttgatggtttttgacttaaaatctattttgtatgatgtaagtgtaggtacttcctgttctctttcggtttccatttgcatggagtcgtttttctgacccttcactttcagtctatgtgagtcttttgtaggcaatatttagttgagtcttgtgtttttatccatttagccactctgtgtgtcttgattggcaaacatattctatttacacttaaagtaattattgataaataaggatttactattgccattttgttttgttttctggttgttttatatatattcccttcttcctctcttgctgtcttccttgggatttgatgattttctgtagtggtgtgctttgatttctttatcttttatgtatctactataggttttcgctttatggtcatgaggcttacataaaatatcctataatataacagcctattttaagctgataacaatttatatcacctacaaaagctctgcactttttttcccttcaacattactaattttacagtttacatctttttatgttgtgtatttatttaagaggccttttccttcttcgatctcaaagaagtagactgttatgtcctgataataggcaagatgtagctaactaactgttctcttctactctcaggtcagaaacaatgttgtgttgttcgtaattaaaaactaaatacacacctgtcagaagggtaacagtaggtaaagaattgagacaataccaaatgctagtgaggatatggggaaaccagatctctcacaccttgttagtaggaatgtaaaatattacagccactctggaaaaagttttgaagtttctttaaaaactaaacataggccaggcgcagtggctcacacctgtaatcctagcactttgggaggccaaggcaggtggatcacctgaggtcaggttcgagatcagcctgaccaacatgctgaaaccccccgcctctactaaaaatacaaaaattagctgggcgtggtggtgcatgcctgtaatcccagctacttgggaggttgaggcaggagaatcacttgaacccaggaggtggaggttgcagtgagcgagatcgtgccactgcaatccagcctgggccacagagtgagactccgtctctttaaaaaaaaaaaaaactaaacatgtatttactatatgatccagccattgttctcctgggcatttaagtaaaacaaaggaaaactgatgtacacacaaaaacctgtacaagaatgttaatagcagctttattagtaatagccaaaacctggtaacaaccaaagtgtccttaaatgctttaggtgaatgataagctatgatacagccatatgatggaatattacttagctataaaaagtaacaaagaattgatacacttaacaacttggatgagtctcaggggcattatgctgagtgggaaaaagccaatctcaaaaggtcatatggtatatgatttcatttatataatatataacattctcatagccatggggaataaattggtggttgtcagggactgaggatgggagagggggtagtgtggatgtgactataatgaggaagaagatctttgtggtgactcaatagttctgcattttgattgtgatggtagttaaatgtatatacaggtgtgattaagtgtcatgaaactatacacaccattataccaatggtaatttcatggttttggtattataccagttatggaagatgtaatcattggggaaaactcagggaaggatacatgctcctctgtagtggtttttttcaacttcttatgaatctatttcaaaataaaaatgtttaagaaacgaaatgccaaccaaatttcatagttaatagatataaatcttctttagtgttactggtttctttaggtggtcatatatacattttaggatggagagaatgagagagttttatatactttattaaaaggaagagtctaatgtttacaattgtttaagaggaaagtctcgtaatgctatgggacacactagaatttgtgaatgtctcaacaccactagtttttttaaagcattgtgtgactaaagggataagaatttaagaaatagaaaatattttttaacatacttggagatataagttaaatttttgatacttatttaaggaatttttttttaaagcagtgtgaactcatctgtggtgttagctatagatgcttctgtatatcattgcaggcatttcgtgtcctgtctgaaccaattggtccagaatccccaagctctacggaatgtcctagggcttggcaatgttcagatgtaccagaacctgcagtctgtgggataagtagaatctgggttttcagactgaagagaagaaagcgcattgcaagacgactggttgataccctcaggtaagaaataaaatggatctagatccagaaccttagattcatagctttcccagaacctctcggcttctgagctaaagggaaggatattggtaagatacttcagtataaatactattaaagtcaggctaaggaaggtattggtactagaaaaaccatactagatgtactcagtctagggtgcaacattccaggtctgaaacatactagcccactgcttttcaaactacctgtgctaaaggactagtttaatttgtcacagaccaacactaataaaataaaaatggattgctagaaaaaaatagaaaaaacaaaactacaatctcaaattgttttagacttaacagatgtgaaattacgcttcaataaatataatctatacaaagtaaaggtttgaaaaattacagaagctgtacatggtcattgatagtgactagataatgaagacttggtataactcataagcataactaaaaaagtggatttgtgagacaatccatagaacgagagaaaatagttgcaaatcatttgtctaagggtctaatacccataaaataattcttataacacaataaaaagacaacctaatttaaaaatggacaaagaatttcagtagacatttctccaaagataaattgcaaatggttaattcaacataaaaagatgctcaacatctttatcagggaaatcacaaaacaaaaccatagtgagatcccactttatacccagtaggatgactgtaatcaaacagacaagtgttggtgaggatgtagaggaaactgaaacccttgtacattgctggtaggaatgtaaactggtgcagttggtgtggaatacaatctgatggtttctcaaagttaaactgttatgtgacctagcagtttcactcctaggtatatactcaagaaaacatgtccacacaaaaccttgcacatgaaggttcatagcaggattatttataaaagccaaaaaagtgtaaataatccaatctgtgattaatggataaatgtgatatatcgatacaataataacaatgggatgttattcagccataaaggaaattctggcacacactgcaacatggaggaaccttgaaaacattatgctaattgaaataaatcagttgcagaagatcgcacattgtatgattatatttacataaaatgtccataagaggcaggcaaatccagaggcagaaagtagatgtgtagtttccagggactgaggaaagatgaatggagagcaactaataatgagtacggggtttgggatgataaaaatgttctagaattagatagtggtggtgactggacaatatttgttaatatacacaaaaccactctgttgtacacttttaaagggtgagtcttacagtatatgagttatatctcaaccaaaaaaatgagtgtccagttttaattcccatgtacacactttgaactgacactatgtattgatgtttaaagtttccaatgtcacaaacaagcctgtttgctaatttacctaatctaggttatatggatgagtttcacaacacttgctctctcaatttctacacatatttcatcgtgtagataataggttacaaaccagtaagcacactttaaccaaaccaaagaccacactttggaatagtgttattcaagcctcttgcattctatgccacttttaaaaaataaatgccaacaccattatggggaccggatcttgggccataaatcctagtcaatcacacatacttacaaagggtatcagtaggaaaaattggtatcttaaagatttttgtttgattagttatgaaatacttttctatgttttatattagatatataaatttggtatgaggaataccagtatctaacctagttctaccatattatgtatttaattatagttaatatattagaagcttatatcttctaattgaatcaaattctaaatttttattccgaaataatttcaaacttacgaaagaacaagagtagtaggaagcctttgtcaagatctattaagttcaacatttacctcatttgctttaccattctatgtttagataaccttcctgaattattttgttacatatattatgcccctttaccccttcatgcattggtgtgtttttcttaaaaacaagaatattctcttatataaccatgatacagttatcaaatttgggaaatttaatattgatgtaatgcttttatttgacagtccatatttcacttttgtctgttgtctcaaatgtccttcatggcatttttttttttttttttttttttgcccagtatcacattcagcatttagttttcacgtctctttaatcttcatcttccctaatctggaacaatttctcagtcttttgacatggaaaaatttgaagagtgcaagtcagttattttatagaatatccctcaattttgattaattctttttttttttctttcacaaacaagctgtaggagatgttgaattcttttaaccatttccttattacttttaatcctaaggtaagcaagatcaaggagagttgtagtcaaaatgcagattagtttttcccttcttaaagctctcagtggatgtttacattgaaaaaatatatataggctggacggtcgctcttgcctgtaatccctgtactttgggaggccgaggcgggtggattacctaaggttggaagttcaagacaatcctggccaacatggagaaaccctgtctctactaaaaaaaaataaataaataccaaattagccgggtgtggtggtgcatgcctgtaatcccagctactcgggaggctgaggcaggagaatcgcttgaacccgggaggcggaggtttgtagtgagcagagatcgtgccactgcactccagcctgggcgacaaagtgagactctgtctcaaaaaaaaaaaaaaaaaaaaaaaatatatatatatatatatatatatattatatatatatatatatagttactgcttaagattgattttttttggttctaattatctttggcttttaattaacaatatgatcttttttttatttttattttttgattgagttggagtctcactctgttacccaggctggagtgcagtggcgagatatcggctcactgcaacctccgcctcctgggtttaagtgattctcctgcctcagcttcccaagtagctgggactacaggcatgcaccaccatgcccggctaatttttgtatttttagtagagacagggtttcaccgtgttaggatagtctcgacctcgtgatccgtccgccttggcctcccaaagtgctgggattacaggcgtgtgccactgcgcctggcctagcaatatgatcttatattagttgctctttaccatggatatcctagagttaggtggatggttccctttgcctctcatcagaattttttctggaccttagttttcccatctgtgaaatgatatcattagacttctgtctctaaaatataaggcattttttcacttactaaaaataaggttgatttaagtcaagagtatttacttaaattgtgctcatgttaattagaatgttaagttgcttccatcattaaatcatcttttcttctcttttaggaattgcttcatgtttggctgttttctcagcactgatgaaatagcattttctgacccaacaccagatggcaagttatttgcaaccaagtactgcaacacccctaatttcctcgtatataattttaatagttaaagctgatttcagttataaaggagttactatctggataagttcaaagagctccttattataaaatacaaactatttaatatcaaaataaaaaataccgagactcacactcatacacacacacacacacacgcacacacacatatcacagttttgttccttatgagttgaaaagtcaggaataaatttgttgaaaattatctggggattcaaaggaaaaatctttgggtgattccctgattagcactctgaatgtttaattatgaaactttgtagctataactggaaaattacctgactctttgtaagagtattaaatacaaagtgatttttctctagaaatgtgacctggtcttttataaagcccactcttagaccaggattatctaatgccacatcagaagcaaacaggcaaatttaaacttgggcaagtaatttctgtgcccaatttgtaaagggaattcctgaatttttttttttttttaatagaggcatgggtctcactgtgttgcccaggctggtctgaaacttttgggctcaagcgatcctcccaaaacgctgggattacagtcatgagccaccgtgcccagcctaattcctgacttctctatacagagtcttcacttgataggcactcgtctgtagtaactcagtttgaatatctttagaaaatgtttagaatttatttgtaacaagatggtaaggaataagattatcccatatgcatttctgtagagcagaatttgatagcttagtgttcaatctttttgaaaataaatgtttacctgtcatcagatttaattaaaattatacttagtaattgcactattacttagttaatttttgttgtatggaaatattggtagtactactttgggaacctgttactgacaattgatgtcattaacaaaatgcctagttggattagatgttttcattttctaattttttgcttgtttaaaatgcaccttacttgttctgagatacctggcaaaagtctttacaaaatgtatggtaatagaaccaaggttagtaaatatacataggctggtggatgagagaccatggaactgtgtaaatacacttaaatgttcacacatttttctagtgtaattcttggatactttaaaaagcaaaacattgttcaaattgttttgattctgaaaaatcattcaactgctaactggcaataagactctaggcaagtcgttttccagattgtaattatatgtagaaactattcatctgcattcattttatttgcctgtaagttaacatgtttccaaaatttaaaagcctgggtccccaaaagaatgtggaagtattaaaatgtatgtaattatgcaaacattttaatgctattttctgcacttatttcttttaaatattttatttaaaatttttaattaacattttgtttgcttaatgcttttgttatgaatcaattaaaattctttattttatacaactaaa

SEQ ID NO: 106 - DNA, 546 bp, Homo sapiens
aaagcggccatgttttacatatttcttgattttgtttgttttctcgtgagcttaggccgctggttttggtgatttttgtctgattgcaatgtctggacgtggtaagcaaggaggcaaagctcgcgccaaagcgaaatcccgctcttctcgcgctggtctccagttcccggtgggccgagtgcaccgcctgctccgtaaaggcaactacgcagagcgggttggggcaggcgcgccggtgtacctggcggcggtgttagagtacctgaccgccgagatcctggagctggccggcaacgcggctcgcgacaacaagaagactcgcatcatcccgcgccacttgcagctggccatccgcaacgacgaggagctcaacaaactgctaggccgggtgaccattgctcagggcggcgtccttcctaacatccaggccgtgcttctgcctaagaagaccgagagtcaccacaaggccaagggcaagtgatttgacaggtatctgagctcccggaaacgctatcaaacccaaaggctcttttcagagccccccta
